United States Patent Application Publication US 2002/0198362 A1 - sequence listing, part 2

SEQ ID NO: 6668 - DNA, 245 bp, Homo sapiens
  unsure (58): n=A,T,C or G
  unsure (69): n=A,T,C or G
  unsure (138): n=A,T,C or G
  unsure (237): n=A,T,C or G
ctgcaagaaaacatacctgtcccccaaaagttgtttttatgcactgtgtctcgtctangcaagcgcttncaagaagccaggattcacttgagaatgtgtctctctctggcaggtctcgacatgacaactactgtgtangtgagggagggaactttcaaagcactttgttttcccacttactatgtgtgagaagttgctcctgctctagatctcatgtgccagtactcaccaatttgnaaaaggct

SEQ ID NO: 6669 - DNA, 247 bp, Homo sapiens
ccttcccagtccccacaggtccccgtcctgataggtccctggagctccactggccctcaggtaaactccaagcgccacactactgtctacaaacgctggtgatctgggcctgcagcccttctcgccttggtggaggcccctccccacgctctggaaagtgcctcaggccctctcagctctggtctctgcaccttccattcccctcacctagatcactcctctaccaaactcctgcacaccttccagg

SEQ ID NO: 6670 - DNA, 225 bp, Homo sapiens
aaaatttccttgaataatccatgaaaggaataattcaaatacagataaacagagttggcagtatattatagtgataattttgtattttcacaaaaaaaaagttaaactcttcttttctttttattataatgaccagcttttggtatttcattgttaccaagttctatttttagaataaaattgttctccttctaaaagtcaaaaaaaaaaaaaaaaaaaaaaccc

SEQ ID NO: 6671 - DNA, 172 bp, Homo sapiens
ctgccctgtcagccctgaagatatcgtgaacaaggatgccaagagcacactgcgggtgctctatggtctgttctgcaagcacacgcagaaggcacacagggacaggacgccccatggagccccgaattgaccctcactgcctccaaagcccggagcctgcctgtcagcccag

SEQ ID NO: 6672 - DNA, 340 bp, Homo sapiens
  unsure (311): n=A,T,C or G
ctgcgagtgggtgagttctgtcacaaccgtggcatcaagctggtggtggcagacacgcggggcctgtttgggcagctcttctgtgactttggagaggaaatgatcctcacagattccaatggggagcagccactcagtgctatggtttctatggttaccaaggacaaccccggtgtggttacctgcctggatgaggcccgacacgggtttgagagcggggactttgtctccttttcagaagtacagggcatggttgaactcaacggaaatcagcccatggagatcaaagtcctgggtccttatacctttancatctgtgacaccttcaacttctccgact

SEQ ID NO: 6673 - DNA, 101 bp, Homo sapiens
ttctgagaagctgattaaagctgtgcccaaagaagtgaactttggtttggttttgaatggtgaaggttgccactgctgactatatcaagctattgagacag

SEQ ID NO: 6674 - DNA, 101 bp, Homo sapiens
cggccgaggtctgttttattgctaaactatcatgatacaagccgtataaaaatactttacatataggaaaaataaactacattaaactggagattaaaaac

SEQ ID NO: 6675 - DNA, 199 bp, Homo sapiens
ctgtccccaccaccaccctgtgcagcaggggttaacagacctcactttgtggggggaaaacagaggcttggagaggtcccctaacttgcccactgtcacacgtagtgagtccagagctgggactccatgtttggcccccccctgcactacctctgtggacaggacactgccctccttgcccttggtctctctttcagag

SEQ ID NO: 6676 - DNA, 204 bp, Homo sapiens
  unsure (18): n=A,T,C or G
  unsure (136): n=A,T,C or G
  unsure (147): n=A,T,C or G
  unsure (171): n=A,T,C or G
  unsure (179): n=A,T,C or G
aaaggatctcatgatttntagtattccaagaattttctttcaccaagggcgatttaatatgggtcattcatacttctcttggatttcttgcctttttttaatctccttgccagccaaatgataaatgccaacccanagaatgcagtnaccatgactgccactggaatgaanagggggtnataatcaccctccttaatcattgag

SEQ ID NO: 6677 - DNA, 217 bp, Homo sapiens
aaatcaaggttcataggaaaagacataaatgaggaaactccaaacctcctgttagctgttatttctatttttgtagaagtaggaagtgaaaataggtatacagtggattaattaaatgcagcgaaccaatatttgtagaagggttatattttactactgtggaaaaatatttaagatagttttgccagaacagtttgtacagacgtatgcttatttt

SEQ ID NO: 6678 - DNA, 296 bp, Homo sapiens
  unsure (125): n=A,T,C or G
  unsure (131): n=A,T,C or G
  unsure (174): n=A,T,C or G
  unsure (179): n=A,T,C or G
  unsure (200): n=A,T,C or G
ctgtgttggcatgcacctgcagtctcagctacttgggaggctgagacaggaggatcactcaagctcagaaggtcgaggttacagtgagctatgatcatgacactgcactccaacctgggcagcanagcaanaccccgactcaaaaaaaacatatgaaaagaaaaaagtatggancatanttggggaaaagcaaatagccntatctgagcacagtcgactcatgatgctctcttctactataactgcctttacttttctcataaaagttgaaaaataccattctgccatttgtgcat

SEQ ID NO: 6679 - DNA, 103 bp, Homo sapiens
  unsure (95): n=A,T,C or G
  unsure (96): n=A,T,C or G
agggactgatgccacaggccaggctgcctctggagggtcctgggctggtggcagcttctaatgctctatggaatgaggacatatccttcttcttnnagaatct

SEQ ID NO: 6680 - DNA, 278 bp, Homo sapiens
aaatgactgtgctgcccctttcacatcaaagaactactgacaacgaaggccgcgcctgcctttcccatctgtctatctatctggctggcagggaaggaaagaacttgcatgttggtgaaggaagaagtggggtggaagaagtggggtgggacgacagtgaaatctagagtaaaaccaagctggcccaaggtgtcctgcaggctgtaatgcagtttaatcagagtgccatttttttttgttcaaatgattttaattattggaatgcacaatttttttaa

SEQ ID NO: 6681 - DNA, 201 bp, Homo sapiens
  unsure (187): n=A,T,C or G
ctgccttttggctcagtcagaatattcaagtctccagttccaatctgagaggactttgagagcaaccctgctttgcagacatctggttttgttctcagagcttcagactttgtatttagacaggaagaaatttcctctggtaaactttgtttatgacatccttgaggaatttttgctccaaggttangtggagagttggca

SEQ ID NO: 6682 - DNA, 223 bp, Homo sapiens
  unsure (91): n=A,T,C or G
  unsure (138): n=A,T,C or G
  unsure (150): n=A,T,C or G
ccttccgggccctcgtgcaggagaagatacaaaaaaggaatcagaggcaaagtggagacagacgccagctacccccaccaccaacaccagncaatgaagagagaagaggagggctcccacccctgcccctgcatccangtggagaccaangaggccctccagtgggtccgctctccctggggctggcgacagtggacatccagaaccctgacatcacgagttc

SEQ ID NO: 6683 - DNA, 100 bp, Homo sapiens
  unsure (61): n=A,T,C or G
ggaaagaatagggcacaggtggggatggatggttggttggatatgtcacttttcttatggnaaacaattaaatccatattctctctgcttaaaagaagaa

SEQ ID NO: 6684 - DNA, 448 bp, Homo sapiens
ccaatgtcaatcttatgttggagttactagtgcagaagaagaaacaactggaagcagaatcacatgcagcccaactacagattcttatggaattcctcaaggttgcaagaagaaataagagagagcaactggaacagatccagaaggagctaagtgttttggaagaggatattaagagagtggaagaaatgagtggcttatactctcctgtcagtgaggatagcacagtgcctcaatttgaagctccttctccatcacacagtagtattattgattccacagaatacagccaacctccaggtttcagtggcagttctcagacaaagaaacagccttggtataatagcacgttagcatcaagacgaaaacgacttactgctcattttgaagacttggagcagtgttacttttctacaaggatgtctcgtatctcagatgacagtcgaac

SEQ ID NO: 6685 - DNA, 429 bp, Homo sapiens
ccaaaagaagtaagacagcttgctgaagatttcctgaaagactatattcatataaacattggtgcacttgaactgagtgcaaaccacaacattcttcagattgtggatgtgtgtcatgacgtagaaaaggatgaaaaacttattcgtctaatggaagagatcatgagtgagaaggagaataaaaccattgtttttgtggaaaccaaaagaagatgtgatgagcttaccagaaaaatgaggagagatgggtggcctgccatgggtatccatggtgacaagagtcaacaagagcgtgactgggttctaaatgaattcaaacatggaaaagctcctattctgattgctacagatgtggcctccagagggctaggttagtacaaactcgcattcatggcttggtttcccagaagatctccatttaactttttt

SEQ ID NO: 6686 - DNA, 286 bp, Homo sapiens
ccacttcaagtcacacaggtagataaaaacaggtccttttaggggccaaaggagaggttatcacagcagcagtttggttctcagcagaaatgcccagggcccctgttccacatcaaagctacaagcactgttgtcagggcatggagagtgacgggaccagagccctcctcgtctcagggcagcctgcctggcttcaaggtggagatcacagcgtcctctggggtcataggttcccccactgttccacaggagggaactggtccacctcgcccacctctgtgctcag

SEQ ID NO: 6687 - DNA, 240 bp, Homo sapiens
ccattgacttttctgtcgccaacagatctggcaaaagcaggcttttactacataggacctggagacagagtggcttgctttgcctgtggtggaaaattgggcaattgggaaccgaaggataatgctatgtcagaacacctgagacattttcccaaatgcccatttatagaaaatcagcttcaagacacttcaagatacacagtttctaatctgagcatgcagacacatgcagcccgcttt

SEQ ID NO: 6688 - DNA, 219 bp, Homo sapiens
  unsure (101): n=A,T,C or G
  unsure (187): n=A,T,C or G
aaaaatagccatctttgtacttttttgcaagtttctctataagcttgaaatagtcatgtgatacttcgacaaacatcatatgccttgcagtttttctcggncgtgttctcagggttgagtagtccccttagctacctaactttactttcaatacaaagcacaaaaaagaatatcttcaaataaaagnttgcctgcagaacctggcaaaatgacccatta

SEQ ID NO: 6689 - DNA, 118 bp, Homo sapiens
  unsure (41): n=A,T,C or G
  unsure (72): n=A,T,C or G
  unsure (107): n=A,T,C or G
  unsure (110): n=A,T,C or G
  unsure (112): n=A,T,C or G
agtgtgatggatatctgcagaattccagcacactggcggcngttactagtggatccgagctcggtaccaagnttggcgtaatcatggtcatagctgtttcctgtggncgntntacaac

SEQ ID NO: 6690 - DNA, 308 bp, Homo sapiens; identical to SEQ ID NO: 3350

SEQ ID NO: 6691 - DNA, 226 bp, Homo sapiens
ctgagcggttgtggccgcgttgccgacctccagcagcagtcggcttctctacgcagaacccgggagtaggagactcagaatcgaatctcttctccctccccttcttgggcagcaaggcgaaccccatccctactcactggagctcagctttgatttttaacctcccttccccacccttccagaacacacacattccattccaaaactgattttataaagacatttt

SEQ ID NO: 6692 - DNA, 180 bp, Homo sapiens
ccttgattattgttgcagttcaatgtggctgtgatgggacatttctgttgacccagtcaggcaaagtgctggcctgtggactcaatgaattcaataagctgggtctgaatcagtgcatgtcgggaattatcaaccatgaagcataccatgaagttccctacacaacgtcctttaccttgg

SEQ ID NO: 6693 - DNA, 378 bp, Homo sapiens
ctggctgcacccagccctgggcatccttaggcttcctggctcctggcagattgctcctgtacggactgccacagagctctgatgttgccctgaccaaagccagtggccccctgcctccgaatcagctccaggaagaaagtgtcctcagtaaaaagggacttggtgaagacctgaagcagaaacttgcctttatcaccatctagcaggatcccctgtcgagcaagcagatgaggctcgtgccctgcagctcggatctgcctctcctttcctggctgctggtagtatgccccagggggagccaggaactggcctccagcagttgccaccccctcagtggcctccacaatgttaggcgtatacagccccacgtgctgcagg

SEQ ID NO: 6694 - DNA, 52 bp, Homo sapiens
ccaccctgaccatcaacagggtcgaagccggcgatgaggccgactattactg

SEQ ID NO: 6695 - DNA, 449 bp, Homo sapiens; identical to SEQ ID NO: 52
  unsure (16): n=A,T,C or G

SEQ ID NO: 6696 - DNA, 493 bp, Homo sapiens
cagagacgctgcaaattgcttgtggacggtgtaggccgctgcaggccaccatgaaccggcttccggatgactacgacccctacgcggttgaagagcctagcgacgaggagccggctttgagcagctctgaggatgaagtggatgtgcttttacatggaactcctgaccaaaaacgaaaactcatcagagaatgtcttaccggagaaagtgaatcatctagtgaagatgaatttgaaaaggagatggaagctgaattaaattctaccatgaaaacaatggaggacaagttatcctctctgggaactggatcttcctcaggaaatggaaaagttgcaacagctccgacaaggtactacgatgatatatattttgattctgattccgaggatgaagacagagcagtacaggtgaccaagaaaaaaaagaagaaacaacacaagattccaacaaatgacgaattactgtatgatcctgaaaaagataacagagatca

SEQ ID NO: 6697 - DNA, 369 bp, Homo sapiens
ctgtactcaaacgtaatctttctactgaggccctgaaggggttaaagattgatccacagatgccagccaaaaagccaaagcggggtgtcccaactagtgcctcagccccacctcgtgttaacactcccagcttcagtggacaacctgataaggggtcatcaggaggtgcttacatgttgcagaagctaattgaagagacagataggtttgtagtgttcacagaagaggaatcaggcatgagtgaccagttgtgtggcattgctgcctgccagacggatgacatatacaaccgaaactgccttattgaattggtcaactgtcagatggttcttcgtggagcagagacagaaggctgtgtcattgtgtcag

SEQ ID NO: 6698 - DNA, 484 bp, Homo sapiens
  unsure (446): n=A,T,C or G
  unsure (450): n=A,T,C or G
ctgttcctggggctgctcccacagactatgagactcagcagcccccaggcccaccccagcagcctgtgatgaccccaaacttcacctggtagccatggagttctctgcacccctcattcactcccctctggtcatttcctgagtctaacatgccctttgaggaaggcaggaggccgatccgtgaacagagagacactgggccccagaggtgacggggctccagggacagacacatctctgccctaagagactgtctcctttctggtgactgtcctgggagggttggattctggcacctcacccagtctcacccgtccctctgtgtccccatgtcctcatgacccagcacaggccacagagctgcagcctagacccagagccctctctgtgccctccattggtctccccttggggtgacctctgtgtcaccaggccgtgtggccctnccangctggattggcatccagtcctcagcctagaccct

SEQ ID NO: 6699 - DNA, 121 bp, Homo sapiens
gggggaagaggtttgttaatacgttcgccatgtgctacgatcttgggacgaactgagccacgagcgtggctttgagggccgtccgaacgctgcaggccggccaggtccctgggcgtccagg

SEQ ID NO: 6700 - DNA, 459 bp, Homo sapiens
ccttgctgaacaggcaagaagattctatgaggtgcctggctcaggaggacacgccactataataattcttttttttgagacagagtcttgctctgttgcccaggctggagtgcagtggcgcgatctcggctcactgcaaactccgcctctcgggttcacgccattctcctgtctcagcctcccaagtagctgggactacaggcgcccgccaacacgcccggctaattttttctatttttagtagagacagggtttcaccgtgttagccaggatggtcctgatctcctgacctcgtgatcccacccacctcagcctcccaaagtgctgggattacaggcgtgagccaccacacccggccaataattcttacctctacaagctagtggggggcaaaggtacacccaggacccaaggaactatctatttagaactgaggggtttcccaaggactatgggcat

SEQ ID NO: 6701 - DNA, 140 bp, Homo sapiens
ccaccctgaccatcaacagggtcgaagccggcgatgaggccgactattactgtcaagtgtgggatcgtaataatgaccatgtcgtcttcggcggagggaccaaactggccgtcctaggtcagcccaaggctgccccctcg

SEQ ID NO: 6702 - DNA, 248 bp, Homo sapiens
aaatgtatttacagaactattcctgcataagttataattcagacatccaaattcaggtaattgcctcttgggtaataagacaaataatgatagtctcaacagaaaaaaagcagctcattagtatacacacagattctaatttgcttcattatttagccatctttgccacaaactacctgctaacagttaaaattctgacatggacacgttttagttgagaagttcaattttgcaaagaatttaatttt

SEQ ID NO: 6703 - DNA, 278 bp, Homo sapiens
ctgacactatgggaggcaagtaatgccttgcgtgttgggcttgtatttgaaataactctgatcaaagaccccttgcccgtttcaataaaacactgccacctcacctctatttgcctgaagggcatcttacctgagttttcttttgtatgctggatgctccagatctgggaataaatcgggttgctatctccaggatttacattgctgtacattggctccagctccattggggctagtggtttagagtgagtgggctcttgagggtctatcctggaagg

SEQ ID NO: 6704 - DNA, 337 bp, Homo sapiens
ctgccaccacggcagggcatgggctttgggggcaacaaggagagacaggctgtctcctctaggaacaactcattattcagctaaacgaaatggaagagctccatgtgaccaacaaacccaaattgagccaaaacaacaggcgtccccaccccccagagggataatgtgccaccaccctgtgtgcagtgggagagcaggaatggaggaaatattcctggttcagttacactcctcgtctgtcaggacagatgtgtcaccctatctcggattccgggagggtggctgggggtttccctcaactctgcagcaaatacttcaatgctactgtcatttgagg

SEQ ID NO: 6705 - DNA, 472 bp, Homo sapiens
ccactacgataagcaggtagctgggttttgtagtgagcttgctccttaagttacaggaactctccttataatagacacttcattttcctagtccatccctcatgaaaaatgactgaccactgctgggcagcaggagggatgatgaccaactaattcccaaaccccagtctcattggtaccagccttggggaaccacctacacttgagccacaattggttttgaagtgcatttacaaggtttgtctattttcagttctttactttttacatgctgacacatacatacactgcctaaatagatctctttcagaaacaatcctcagataacgcatagcaaaatggagatggagacatgatttctcatgcaacagcttctctaattataccttagaaatgttctcctttttatcatcaaatctgctcaagaagggctttttatagtagaataatatcagtggatgaaaacagctta

SEQ ID NO: 6706 - DNA, 339 bp, Homo sapiens
  unsure (14): n=A,T,C or G
  unsure (192): n=A,T,C or G
  unsure (210): n=A,T,C or G
  unsure (223): n=A,T,C or G
  unsure (270): n=A,T,C or G
  unsure (271): n=A,T,C or G
  unsure (284): n=A,T,C or G
  unsure (288): n=A,T,C or G
  unsure (293): n=A,T,C or G
ctgatgcctcactnctagatgcagtgctgggaccttcctcttttggagctgtcccatgtacagtggacccaagctcaggaccttcgtggagctgcttctccaacctgagaaactcaagacccatcctcccgctgtcactttggacaatggaaatctacattttcttttcccttttttttttttgagacagantctcgccctgtcacccangctggagtccagnggcacaatcttggctcactgcaacctctgcttcccgagttcaagcanntctcctgcctcancctnctgantagctgggattataggcatgcaccactcacacccagctattttttg

SEQ ID NO: 6707 - DNA, 244 bp, Homo sapiens
cctggtctctggaagatgaacttaaaaccagcttctcaaggtggttcatttaccacacatacttcagtgctcttttctgatttcatgtcccttatcaaggtttatgatttggggaccctcaggatttaagtgatcatggagaaaggaccataggtattgctggctcttaacagggcagttaacatagctgaaggatgtgggctttcttatgttctccatgcctaggacttcctccgtcaggcag

SEQ ID NO: 6708 - DNA, 486 bp, Homo sapiens
  unsure (150): n=A,T,C or G
  unsure (151): n=A,T,C or G
  unsure (170): n=A,T,C or G
  unsure (171): n=A,T,C or G
  unsure (183): n=A,T,C or G
  unsure (184): n=A,T,C or G
  unsure (199): n=A,T,C or G
  unsure (201): n=A,T,C or G
  unsure (341): n=A,T,C or G
  unsure (386): n=A,T,C or G
  unsure (419): n=A,T,C or G
  unsure (431): n=A,T,C or G
  unsure (444): n=A,T,C or G
  unsure (451): n=A,T,C or G
ccttgcctcacatccaaggtcactcggaagaggccatgtctaccctcaatgacactcatggaggaaatgctgagagaagcattcagatgcatgacacaaggtaagactgccaaaaatcttgttcttgctctcctcattttgttatttgtnntatttttaggagttttganngcaaacatgacnncacccagaaattcantnaatgggactttcccggcagagccaatgaaaggccctattgctatgcaatctggtccaaaaccactcttcaggaggatgtcttcactggtgggccccacgcaaagcttcttcatgagggaatctaagactttgggggctgnccacgattatgaatgggctcttccacattgccctggggggtcttntgatgatcccagcagggatctatgcaccccatntgtgtgactgtntaggtaccctctntggggangcattatgtatattatttccggatcactcctggca

SEQ ID NO: 6709 - DNA, 305 bp, Homo sapiens
  unsure (14): n=A,T,C or G
  unsure (15): n=A,T,C or G
  unsure (17): n=A,T,C or G
  unsure (78): n=A,T,C or G
  unsure (165): n=A,T,C or G
ctgcaaatggttcnncngaaacatctgccttggacacagggttctcgctcaacctttcagagctgagagaatatacanagggtctcacggaagccaaggaagacgatgatggggaccacagttcccttcagtctggtcagtccgttatctccctgctgagctcanaagaattaaaaaaactcatcgaggaggtgaaggttctggatgaagcaacattaaagcaattagacggcatccatgtcaccatcttacacaaggaggaaggtgctggtcttgggttcagcttggcaggaggagcagatcta

SEQ ID NO: 6710 - DNA, 420 bp, Homo sapiens
ccggacggagggccggcgaggtgcggggtctggtgatgcgagctgcgcctctcggcaagatttcgcgctgcccatcccgggccctttcatcagtaatcggtagtggatcactctgccaagcggcaggaagaattaaggaaacgacaaggagacgctcggctctctcccgcttggctccttgcggcctcctcttcccttcgctccggcccggtgaaactgaacttataatcgtcactggattgtaagtacccgaggcgaagagagctcgctgagccctgattttttgagtgtctttgttccgggagagtttgtgagttgaaagtatctctgctgggctttctgggccgaaaaccgttccgggggagccgccatttgctttcctgttccctagctagctagctagctctctccgcgttgtcc

SEQ ID NO: 6711 - DNA, 262 bp, Homo sapiens
ctgcaaagtaaatattgagcagtttctgcaaaagaatagcagaattatgaacgtgcattcattctctaatggtttagattgcattatacttagttgttaggttgagcgtaatttttcttgtttcaaattaaatagacagtttcaagcattactttctcaggatgatctctttttgatgcttttttcttacagttacagatttatggtaatggaaagactaggaatagatttacagaagatctcaggccagaacggtaccttt

SEQ ID NO: 6712 - DNA, 292 bp, Homo sapiens
aaatttgtgagcctgcttgggatccattacctagccattcagagatcctgtcaaatgcacagcagattggatactcaccatcccaaaggggttcctcccacctggatggggccaatctctagttgacagtgcccctcagagtgcaccatggagatggaatgtcccttccagagagacttttacacagggaaaagcatttgttggctgggctccaactctcatttggtacaaaaagctttacattcttttccctttttacattacattcttcaaagacttccgtgcttgccag

SEQ ID NO: 6713 - DNA, 515 bp, Homo sapiens
ctgattgagcgaaggaacgagtgagccgagccagtcagcagcattagtgtgatacgtgttgcttttcaattaaagctctctgcctctcggttgagcaactctgagagccggggtccccacccttctgtccccctcatggtgggtcttgtacccaacagcttgccagagcagagagccatgaatagggtttggtttcaggaaagatgaccaggagactcagcccaggagtcagcctgagttcaaatcctggccccacgcttcctgccttgtcaccctgggcatgtgattcagttcttggttcttgtacatttgggtggaaactgacaactgcctgccatggggagaaccagcttgcctgccttctgcaccacggctggcactgatcattagcaggttaaaaaaaaagctttgccaatacgccgggcacagtggctcacacctgtaaccgaggcactttgggaggccgaggcgggtggatcacctgaggtcaggagttcgagatcagcctggacctc

SEQ ID NO: 6714 - DNA, 525 bp, Homo sapiens
ctgttatttccccagtggggcctcccaaggagcttggctgcttggcttgagtgggacaagggcaggggtccctgactccccacctgatcaaaggctggggaggtggtagggagcacccagaactgccggacgggcctcccacaccccaggtgagcaaacaagcacggagcagcttcctgcggttccatctgagtgacatcctcacgggggcagggcacggcttcctggggcctggggacttccctgcctcagtgtgtttcttacacttccctgcctaaggtgatgccacggaggggatggttgagatgactcccacgggccccttccagtccacctttctccgttccgactctgagtttcctcgggtctatagcttatgggaagggagtgaggaggggacaagccagcctccttccccatcaatgcccacaacctcccatcccctggacccagccaccctaggagttctccaccccaccccatctcgcctggcggaggggaccgccgggtttgattgatccatct

SEQ ID NO: 6715 - DNA, 237 bp, Homo sapiens
ccatccgcttcctgaatgctgagaatgcacagaaattcaaaacaaagtttgaagaatgcaggaaagagatcgaagagagagaaaagaaagcaggatcaggcaaaaatgatcatgccgaaaaagtggcggaaaagctagaagctctctcggtgaaggaggagaccaaggaggatgctgaggagaagcaataaatcgtcttattttattttcttttcctctctttcctttccttttttt

SEQ ID NO: 6716 - DNA, 343 bp, Homo sapiens
aaagccattggatgtgccacaatgatgacagtttatttgctactcttgagtgctagaatgatgaggatcttaaccaccattatcttaactgaggcatccaaaatggtgagttggggaacatagagagtacacctaagttcacatgaagttgtttcttcccaggtcctaaagagcaagcctaactcaagccattggcacacaggcattagacagaaagctggaagttgaaatggtggagtccaacttgcctggaccagcttaatggttctgctcctggtaacgtttttatccatggatgacttgcttgggtaaggacatgaagacagttcctgtcatacctttt

SEQ ID NO: 6717 - DNA, 66 bp, Homo sapiens
  unsure (12): n=A,T,C or G
  unsure (13): n=A,T,C or G
  unsure (14): n=A,T,C or G
  unsure (36): n=A,T,C or G
  unsure (44): n=A,T,C or G
ctgtagcttctnnnggacttccactgctcaggcgtnaggctcanatagctgctggccgcgtacttg

SEQ ID NO: 6718 - DNA, 199 bp, Homo sapiens; identical to SEQ ID NO: 53
  unsure (142): n=A,T,C or G
  unsure (160): n=A,T,C or G
  unsure (167): n=A,T,C or G
  unsure (174): n=A,T,C or G
  unsure (187): n=A,T,C or G

SEQ ID NO: 6719 - DNA, 513 bp, Homo sapiens
  unsure (16): n=A,T,C or G
gagggaaggaaattantgatgatgaggcagaggaagagaaaggtgagaaagaagaggaagataaagatgatgaagaaaaacccaagatcgaagatgtgggttcagatgaggaggatgacagcggtaaggataagaagaagaaaactaagaagatcaaagagaaatacattgatcaggaagaactaaacaagaccaagcctatttggaccagaaaccctgatgacatcacccaagaggagtatggagaattctacaagagcctcactaatgactgggaagaccacttggcagtcaagcacttttctgtagaaggtcagttggaattcagggcattgctatttattcctcgtcgggctccctttgacctttttgagaacaagaagaaaaagaacaacatcaaactctatgtccgccgtgtgttcatcatggacagacctgcccgggcggccgcccgggcaggtaaatcaattcaaaatatctcttaaatgcctttgtaaaatcagctctatacta

SEQ ID NO: 6720 - DNA, 373 bp, Homo sapiens
  unsure (26): n=A,T,C or G
  unsure (29): n=A,T,C or G
  unsure (30): n=A,T,C or G
  unsure (89): n=A,T,C or G
  unsure (94): n=A,T,C or G
  unsure (101): n=A,T,C or G
  unsure (117): n=A,T,C or G
  unsure (200): n=A,T,C or G
  unsure (215): n=A,T,C or G
  unsure (218): n=A,T,C or G
  unsure (229): n=A,T,C or G
  unsure (233): n=A,T,C or G
  unsure (238): n=A,T,C or G
  unsure (273): n=A,T,C or G
  unsure (321): n=A,T,C or G
  unsure (353): n=A,T,C or G
  unsure (356): n=A,T,C or G
gcctggatgcacctggaatatgccancannacctgctccacctggtgtgcgctcttaggttcctggaatatcttcttcctggcagccanacggnccagcangccacccttctcccantgggcatggacctggcgcaggtactcgtaggaggggaagaaacagaccacccctccaggaaccacaccgcacaggttacaganaatgcgacccacctngtncatcatctgangcanctctnttttctggaacgtgaattccagcggctggttgganatcccgctgcagatgacgaggggcaggatgttgtctggagggatcacntgaccacaggaaaactccaccacgcgctcagnttncaccccggcacaggcca

SEQ ID NO: 6721 - DNA, 407 bp, Homo sapiens
cctcccatcagtccctggtccgctcgctggcccgcacagacgaggcgaggggcctgctctggctattggaagaggaggctctggtgccaggggccagtgaggacaccctcctggagcgccttttctcctattatggcccccaggaaggtgacaaaaaaggccaaagcccccttctgcacagcagcaaaccacaccactttctcctgggccacagccatggcaccaactgggtagagtacaatgtgactggctggctgaactacaccaagcagaacccagccacccagaatgtcccccggctcctgcaggactcccagaaaaaaatcatcagcaacctgtttctgggccgcgcaggcagtgccacggtgctctctggctccatcgcgggcctggagggcggctcgcag

SEQ ID NO: 6722 - DNA, 292 bp, Homo sapiens
ggaagcagcactggtggtgcctcagccatggcctggaccgttctcctcctcggcctcctctctcactgcacagactctgtgacctcctatgtgttgactcagacaccctcagtgtcagtggccccaggaaagacggccaagattacctgtgggggaaacaatattgggagtaacaatgtacactggtattaccagaagccaggccaggcccctgtcctaatcatctcttttgataacgaccggccctcagggatatctgagcgattctctggcttcaattctggggacatgg

SEQ ID NO: 6723 - DNA, 575 bp, Homo sapiens
  unsure (543): n=A,T,C or G
  unsure (551): n=A,T,C or G
aaatattgcgtgactggggcttttctcttcagcaaggtcacaggcacagagcaggtcggaatcgattgagatgggtttctgcttaatccaaaacttagtgctggctttctgattcgtaacagggtctatctctactttgtctccagagatacctagctgtacgtcggttgtgaatcgcggtctgtggatcatgctgactttgaatgacttgtaatgatggctgctaagcatatcctgtactgtggctatgtcaatttgcgaatcctcctcaaaaaccccgtctgcccttgaacctgaaactttctgggatccttttcctcgcttcactgccttcagtaagatttccttcatggtaacctttgtgttgtccacctgaataagggagaatccatgagcagcatttattcgaacaaagagtgactctttggatgtcagaccaggagatgagtacttttcaaccagggccaaagtactgaagccaaacttatgaatgggctcattggaatccagcggggggaaatcggtgtccacctccccatcatnctcagcantatgcaggcagtaggcactgacat

SEQ ID NO: 6724 - DNA, 315 bp, Homo sapiens
ctgtgcgggtggtagactttggcagtgccacctttgaccatgagcaccatagcaccattgtctccactcgccattaccgagcaccagaagtcatccttgagttgggctggtcacagccttgtgatgtgtggagtataggctgcatcatctttgaatactatgtgggattcaccctcttccagacccatgacaacagagagcatctagccatgatggaaaggatcttgggtcctatcccttcccggatgatccgaaagacaagaaagcagaaatatttttaccggggtcgcctggattgggatgagaacacatcag

SEQ ID NO: 6725 - DNA, 461 bp, Homo sapiens
ctgaagtctgtactggagatgtatggtcacttctcaggtataaaccggaaggtacaattgacttactaccctcatggagtaaaagcttctaatgaggggcaagatccacagagggaaactctggccccatctctgttgctggtactgaagtggggtggagaactgactcctgctggccgtgttcaggctgaggagctggagcgagcttttcgctgcatgtaccctggaggacagggtgactatgctggcttccctggttgtgggctgcttcgtctccatagcactttccgccacgatctcaagatctatgcctctgatgagggtcgtgttcagatgactgctgctgccttcgccaagggccttctggctctagaaggggagctgacacccattttggtgcaaatggtgaagagtgccaacatgaatgggctactggacagcgatggggattccttgagcag

SEQ ID NO: 6726 - DNA, 146 bp, Homo sapiens
ccatgattacccccggcaccttccatttttcctaaaaaaaaatgattacagtagttgtccaaaaatgaaggagctctgttgtcccatgggtaagtctatggcacacaatgtaaaaaatgatctagacacagtgatttaaggatttt

SEQ ID NO: 6727 - DNA, 406 bp, Homo sapiens
ccttctgcagttccctccagagctgatgttccgtaaaatgcgaggcttaagtgaatttccagagaatttctcagccactggagacgtcctgtctcacctgacctcctctgtggacctgtactttggggcgcaccatcccctccatgtgacaatgttgcccaatccctcgcacctggaggccgtcaaccccgtggccgtgggcaaaactcgcggcaggcagcagtctcgccaagacggcgattactctccagacaactcagcccagccgggggacagggtcatttgcttacaggtccatggtgatgcttctttctgtggtcaagggattgttcctgaaacattcacgctgtccaatctcccacatttcagaattggtgggagtgtgcatttgattgttaataaccag

SEQ ID NO: 6728 - DNA, 111 bp, Homo sapiens
  unsure (14): n=A,T,C or G
ccaggctggtctcnaactcctgacctcgggtgatccacccgcctcagcctcccaaagtgctgggattacagacatgagccactgcgcccggcctcttaattaccttttttt

SEQ ID NO: 6729 - DNA, 285 bp, Homo sapiens
aaaaggcaaacactcccaaacagacaaacagtaaacatgcagaaaacagactggagtagaaatcaacaaattagcaattacattatacctgaggtgctggaggatgctgtggcattccctggggacttgtctgggcataataggctgcttgttgtctataatactcagcccaggctgcactataatctggctgaccacctggaggagccccagtcggagcagggactgcctgacccattttcttgtagtactcttcccaagccttggtataatcaacctgtccag

SEQ ID NO: 6730 - DNA, 517 bp, Homo sapiens
  unsure (452): n=A,T,C or G
  unsure (471): n=A,T,C or G
  unsure (485): n=A,T,C or G
  unsure (497): n=A,T,C or G
cctcggatgatgaagacagtgcccaccacaatgcccacgaggcccacagacaaccccagggcgcagaccacagtctctgtgagctctgacataggggctggaatctcaggctcccagtgtttcagaagaggcttgtccagtccccagtgctccaccttgcagtcataactctcctcagcagaagggaggagggtgaggtaactgatcttgaagaaggaatgatcactcttggagaggaagctggtctcagaaacaccttctgtgactgagtgcccattgctcagccatgtgatgttgaccacaggaggaaagatgttgtccacaagacagatgaggatgttgggctgacccagtgtcacgggagacttggaaaacactgtgacctcaggaacctcattggtagcagcggtagagttggagcgtttaatcagactgttcaagttatgttttangacagcgatgtttgtcagngcaaattgcgggtnaatctaaattgnctgagaacaggcaaacacca

SEQ ID NO: 6731 - DNA, 434 bp, Homo sapiens
ccaccaggtgctgtgagtttctgtggctcatggcctctgggctggtcccttgcacagggcccacgctggagtcttaccactctgctgcaggggtggaaggtggcccctcttgtcacccatacccatttcttacaaaataagttacaccgagtctacttggccctagaagagaaagttgaagagtcccagacctactagcattttgcaactatgcttgtaaagtcctcggaaagtttcctcgcgtaccagacagcggcgggggctgatagcaattttagtttttggcctccctatcctctcacatgagaacactgcctggatgcatctcatgatctctggagaatttccccatctttctcttctttccatcgtgtggattcaatagtttggatttgaaggctgccctgcccccgactctcctgccgcacccctgg

SEQ ID NO: 6732 - DNA, 513 bp, Homo sapiens
ctggtggccctgaagaagatcagactggatttgtgagtgctgggacggcccctgagttacccaccctgggccatcacaacctgggcgctccctgatccgttccctctttcctggagtccacgtttaactcctctgggtgctgcccagcagcccttacctgtcctctccccagttcactgccttctgaccagcctttgccggggccctgactgtggagtttggtggatgacgtgccaaggagcacaggtctccattgccggggccctggtcattctgtggggttaaggagaagccgatccccctggctggaagtgcccttcttggcccaagtctctgcccacggctgtgcccttgtttcttgcagggagatggagggggtcccaagcactgccatcagggagatctcgctgctcaaggaactgaagcaccccaacatcgtccgactgctggacgtggtgcacaacgagaggaagctctatctggtgtttgagttcctcagccaggacctgaaga

SEQ ID NO: 6733 - DNA, 378 bp, Homo sapiens
ccagtcaggacacagcatggacatgagggtccccgctcagctcctggggctcctgctgctctggctcccaggtgccaaatgtgacatccagatgacccaatctccttccaccctgtctgcatctgtcggagatacagttacaataagttgtcgggcctctcagaatatagatcggtggttggcctggcatcaacagaaaccaggcaaagcccctaatgtcctaatttatgcgacttccagtttagaagaaggggtctcattaagatttactggcagtggatctgggacacaattcaatttaaccatcaccagtctgcagcctgacgattcagcaacttattattgtcaacattattctgcatctcttcgcagttttgg

SEQ ID NO: 6734 - DNA, 294 bp, Homo sapiens
  unsure (165): n=A,T,C or G
  unsure (231): n=A,T,C or G
ccgggcaggttgggggtaaatcaggggtgctgctattcccccagctacctggaccagccctgccttgagaccgtcaaccgcatcaagttgtacagtgagtccctggcccggtatggcaagagcccatatttatacccgctctacggcttgggcgagctgccccanggttttgcaagattgagtgccatctatggggggacatatatgctgaacaaacctgtggatgacatnatcatggagaacggcaaggtggtgggcgtgaagtctgagggagaggtggcccgctgcaagcag

SEQ ID NO: 6735 - DNA, 580 bp, Homo sapiens
  unsure (520): n=A,T,C or G
  unsure (528): n=A,T,C or G
ccacttagtttgctggctcagtcactacttgaagaccccatttaatttttctctggcagttatagctcttgtgatttcagtacagtctcatctctcagaccaatctcatcaagaaggattgaagggataactatgaggtaagctggacattggagccgtgtttgctgccacgtcagcgtcttgctgggtgaatgtcaagccataaatgggctccagggctctggatctcatcagcattggaaatctattgcctctcatcagtctgaccaaattatgtagagcattaatgtagagactcccattaatgggaatacaagaggcagacctgcccgagcggccgcccgggcaggtccaaagatggctcagaacagatctcacagaaacggtctgagtgtccgtggttaggtatcaggattagtgagagcccagaaccaggtcaaaggactttcacaacattaagttctgtcaactgcccttttataagtactctgaatactgaaggctgttcaagcaatttggnaaattggnaacgatgattatgtttcagaaccccagcaagaaccttgcccatatgcttgtg

SEQ ID NO: 6736 - DNA, 443 bp, Homo sapiens; identical to SEQ ID NO: 541

SEQ ID NO: 6737 - DNA, 177 bp, Homo sapiens
ccaaggaccacctgggctcccaaggagtggagggaggagggattcagttccacaggaaataaatgggaacagcccggtggagaagacaatgacaactgcaggacaacacctcaaccactccagaaaacagcccttgctcctccttctggccttttcatatttccaagttactgtttt

SEQ ID NO: 6738 - DNA, 260 bp, Homo sapiens
aaaatccattttattttcaatctgtaccactggggataatgtacttcataattctaccatagtatgtgtggagttttacagtgaggcttcagttttattaaaattctctgttgtggcttctatgctgttaataatttctgatttttcttctacctttgttattaatattaatattactaatattataaacacagcttaaagagttgtgggtctttttttcaaatttatggtcctttattttaatgtattttttacctgcc

SEQ ID NO: 6739 - DNA, 223 bp, Homo sapiens
cctctttgatgacctttggagaatcaggttcagctctgttcagctccttggggatctcctgtttcacatctcaggagtcactgggaagatgaccacagaaactgcctctgaggatgataactttggaactgcccagtccaacaaggcgatcatcactgccctgggggtagagcggcggaaccgggtgttggcagggctgtacacgggccgctcagacacccag

SEQ ID NO: 6740 - DNA, 363 bp, Homo sapiens
ctggtgtgggtgagtgtcctcggggctggtgaggggacagcagcttcagtggaaacccttccctatgtgtggccgagggcctagaacacgtctgagcgggtcaggtgggttcttcccactggagggcgtggcctcaggctgagagtgaagacggggaaggggaggaagagaacagctcgggctcctgagaccaggagccagacctggtaagtacatgaccttaggggctgggcctttgcctgtaatcccaacgctttggaggcccaggcaggaggatcggatcacttgaagccatgagttaaaaccagcctgggcaacaaagcaagaccctggtctccaccaaaaataagtaattaatttttt

SEQ ID NO: 6741 - DNA, 316 bp, Homo sapiens
aaaatctccaatttatgatttcccttggaaaacaggaagttctggtaacactgagactgcattcgagggtcccacaaaccagacttggtttctcacttcccgtaacagtaacgaatggaagacttgatgatttacattacctgcctggcccctgtagcaacttgagttcaaaactgttggacagggtcatgattccttaacatggtattcaaagcttcatgattggctgggtgcggtggctcacagttgtaatcccaccactttgggaggccgagatgggtggaccacttgaggtccaggttcaagaccagcctgg

SEQ ID NO: 6742 - DNA, 520 bp, Homo sapiens
ctgtggcttcccggcatgccctgtgaccccaagccgcagggtacaggaaagaagtttgtgctgggggactcaaagacccagaggttaattaacaggaaccagggccaggggccttcatctagaggtcagtggagtctccagggcactcatcactgtggctgggagactacagtgtctcggctgcggacttgtggaagaagagggggaaggatgggagaaggggtgactggatgccagccaggaatcctggccttagccctatcctggcctcgcctaatcagccatgtcgttattcttacacctttcttcttgggagacccaacattattctgagatgccatgagactgtttagcttttcttcatggccccagggagtgaggctgagggcagtcacttcccctccaatgccctcgactgcccagtaaaagaatggcgggacccaaggaggaaagagtggggggcagacaacgcttgggggatcagtccactttctctacattcaaactgcagaccaaatag

SEQ ID NO: 6743 - DNA, 605 bp, Homo sapiens
aaaattctatcacaaagggattgcttccttaacagcagctagtacaccactgaatcctttaagctttcagtgtgaatttgtaaaactcaggattgaccttttacaagccttctctcaacttatctgtacttgtaatagcctgaagacaagcccaccacctgcaattgccacaacaattgccatgaccttaggaaatgacctccagaggtgtggtcgcatctccaatcagatgaaacagtccatggaagaatttcgaagccttgcttctcgatatggagatctttaccaggcatcttttgatgctgactcagcaactttgaggaatgttgaactacagcagcagagctgtttactgatatctcatgcaatagaagccctgattttggatccagaatcagcaagtttccgggaatatggatctactggaacagcccatgctgatagtgaatatgaaagaagaatgatgtctgtatataatcatgtcttggaggagcacacagcatgcctctgcaatgccatcattgctttgctgaaaagttcccctttctttccagagatattttttccagaaactacagtctaccagcatcaagcttgctctgtca

SEQ ID NO: 6744 - DNA, 402 bp, Homo sapiens; identical to SEQ ID NO: 3672

SEQ ID NO: 6745 - DNA, 243 bp, Homo sapiens; identical to SEQ ID NO: 622

SEQ ID NO: 6746 - DNA, 204 bp, Homo sapiens
  unsure (14): n=A,T,C or G
  unsure (108): n=A,T,C or G
  unsure (109): n=A,T,C or G
  unsure (154): n=A,T,C or G
  unsure (155): n=A,T,C or G
  unsure (168): n=A,T,C or G
  unsure (185): n=A,T,C or G
  unsure (186): n=A,T,C or G
cctgggatgcacgnagaaaggctgaccacaagttgagacaagatacagaaacaaacaaaaacagcagaaagtccgatcgatggtgtaagtgttgtgttcactgcttanngtgcaggtgagcttgatcgaggctcccagtaaggcagatgtagannggggctgagtcancacaggcagagcacagnnacctgtggagaaaatgaa

SEQ ID NO: 6747 - DNA, 422 bp, Homo sapiens
ccagtttcagaaaatagttggtggtttaattgagcttgttgatcaacttgcaaaagaagcagaaaatgaaaagatgaaggccatcggtgctcggaacttgctcaaatctatagcaaagcagagagaagctcaacagcagcaacttcaagccctaatagcagaaaagaaaatgcagctagaaaggtatcgggttgaatatgaagctttgtgtaaagtagaagcagaacaaaatgaatttattgaccaatttatttttcagaaatgaactgaaaatttcgcttttatagtaggaaggcaaaacaaaaaaaagcctctcaaaaccaaaaaaacctctgtagcattccagcggcttgaccaatgacctatgtcacaagaggtggcgtgtaaggaatgcagccccctgaagacagcactacaagtct

SEQ ID NO: 6748 - DNA, 273 bp, Homo sapiens
  unsure (11): n=A,T,C or G
ctgcagattanatcacattccacagaatctctaagatggtaccaaggcatgccaggaatttcagaaagctttacatctaaatagcttctcgaacattttcgcaaccaaaacacatcggcttcagttgttatctgagaatatcaagaagctgctggccgaaaatgcaaatgtgagctgggtgtggaccatgcttcctctgggctctggggctgtcacacaacgtggggctcaagacagatttggggccatgtgggagaatttcctggggactgg

SEQ ID NO: 6749 - DNA, 263 bp, Homo sapiens
ccaaggctgctcaaagccctggacacctcacgtttatatcaacagagcagttgctagaggaagcagcctcccgccctccagaggggtgtctggtgcccgagccctgttgtttgtgtaccttgtctcagtagtgtccagaggggctcatgcagcatcgcctcatggactaagaggtgacctcacctggtgcaggggactgtgcccggggcactcctccagtggctccccttcctgcccacccctgaggaggcagccctaggtag

SEQ ID NO: 6750 - DNA, 373 bp, Homo sapiens
ctgtagcttctgtgggacttccactgctcaggcgtcaggctcagatagctgctggccgcgtacttgttgttgctttgtttggagggtgtggtggtctccactcccgccttgacggggctgctatctgccttccaggccactgtcacggctcccgggtagaagtcacttatgagacacaccagtgtggccttgttggcttgaagctcctcagaggagggcgggaacagagtggccgagggggcagccttgggctgacctaggacggccagtttggtccctccgccgaagacgacatggtcattattacgatcccacacttgacagtaatagtcggcctcatcgccggcttcgaccctgttgatggtcagggtgg

SEQ ID NO: 6751 - DNA, 255 bp, Homo sapiens
aaagcagccctagtcatggtgctggtgctaccgccttgttttaggagcctgcctcctgtcagtatgaaaccctcacctgaaaaatgccagcctggacaccaaacactgagccccttcaacaggcacattatttccccctgagatccataagggaatttagtttctactattgtagagttctgaaaagaggtaaaatagtagtcctttggtcatcctatttttgctttcaattttgatatttcagactgtaaaagg

SEQ ID NO: 6752 - DNA, 350 bp, Homo sapiens
ctgaaggactgggagggtctgacaagcctgctgctggagaaggaccagagcacgtgccacatggagccagggccagggaccttccacctcctagggtgaaaccaggagagattgcttgcttcacttgtacaaggcaggaacggtggcatggcgtgggggaaacttggagttggaaggtggctaatctttgattctatgtttttgatcctcctggcactccagacctgggtgatatgcaggagagcacactgatagaaatccttgtgtccagtgcccagcaactcctgcctcagcctcccgagcagacctgcccgggcggccgctcaagccctatagtgagtcgtattaga

SEQ ID NO: 6753 - DNA, 342 bp, Homo sapiens
  unsure (15): n=A,T,C or G
  unsure (16): n=A,T,C or G
  unsure (20): n=A,T,C or G
  unsure (118): n=A,T,C or G
  unsure (119): n=A,T,C or G
  unsure (220): n=A,T,C or G
aaaaatggagcacanngacnagaatattcaattctggatggcatgtgaaacctataagaaaattgcctcacggtggagcagaatttctagggcaaagaagctttataagatttacatnnagccacagtcccctagagagattaacattgacagttcgacaagagagactatcatcaggaacattcaggaacccactgaaacatgttttgaagaagctcanaaaatagtctatatgcatatggaaagggattcctaccccagatttctaaagtcagaaatgtaccaaaaacttttgaaaactatgcagtccaacaacagtttctgactacaactcaaaagttt

SEQ ID NO: 6754 - DNA, 206 bp, Homo sapiens
aaaaagttgttaggtcattatttgtcggggagggaatgacagaggcgactccttctctcaacactggctaaaaacaagacaggcaaaatacaatacaatattctggttgggatcctggaacagaaaatgaatgttagcagaaaaactggtaaaatattaataaagcgtgtagttcaattaatagtattataccaatgttaatttcc

SEQ ID NO: 6755 - DNA, 338 bp, Homo sapiens
  unsure (223): n=A,T,C or G
  unsure (254): n=A,T,C or G
  unsure (255): n=A,T,C or G
  unsure (290): n=A,T,C or G
cccggagatctgttgctagacgactgttttccaactccagttgttctgtttggcctttgcactcctctaactgggcagagacttgttccagcaccctagaaacctcctgcttttcctcaattgccacatcacgttcctgcagggcttgctggctcttgactgtgagtttctctgtgagttgtcgggaccgactcagcaaagctgtccatgttgtataatccanttgcatggacctccagtcttgttgcaaggtnnaagtaagactcactgtctgctgaaccagctcttcntgcttggcatgaagccctaccagttgggtctgggcatccttcagaagg

SEQ ID NO: 6756 - DNA, 118 bp, Homo sapiens
gtgaatggagcagttctgagaaccacccttttgctaagggagcttgggagccacatggctgctcccttcacactgggtaacagtgtagtatcctgtgagagaataaatgtattcattt

SEQ ID NO: 6757 - DNA, 265 bp, Homo sapiens
aaaatccagaatgcacaaagtactgcacaatttgatcactaaatcattagttgataagcgaacctcacacaacagcttcatgtcagccaaggccacaaacaccgtgtaccacacatgtgaacggacagattgacatgttaaaaacacaacatcagtgcatgttggggattcctggtgccagaaacaggggtgacgggagggcagaactagtccttagcagcttcctcctcctttattttagctgaggcactctctcgggctttgg

SEQ ID NO: 6758 - DNA, 408 bp, Homo sapiens
cctatcataattcccccgcgtaccttgcttacataaatgcaaaaagtcgtgcagaagctgctttagaggaagaaagtcgacagagacaatctcgcatggagaaaggagaaccgtacatgagcattcagcctgctgaagatccagatgattatgatgatggcttttcaatgaagcatacagccaccgcccgtttccagagaaaccaccgcctcatcagtgaaattcttagtgagagtgtggtgccagacgttcggtcagttgtcacaacagctagaatgcaggtcctcaaacggcaggtccagtccttaatggttcatcagcgaaaactagaagctgaacttcttcaaatagaggaacgacaccaggagaagaagaggaaattcctggaaagcacagattcatttaaca

SEQ ID NO: 6759 - DNA, 272 bp, Homo sapiens
ctgcctgggcaccaccgacaaggacgtgctcatctccgagttccagaggctgctcggcttccagctcaatcctgccggttgcgccttcttcctggacatgaccaactggaacctacaagcagcaattggcgcctattatgactttgagagcccaaacatcagtgtgccctctatgtcctttgttgaagatgtcaccataggagaaggggagtcaatacctccggatactcagtttgtaaaaacatggcggatccagaattctggggcagagg

SEQ ID NO: 6760 - DNA, 244 bp, Homo sapiens
  unsure (17): n=A,T,C or G
aaatctcacaaaattgntttgataaacatactcttataattcttgcaacaccttgggaaatagttggttctatattactgttttatagctgaggagaaagactcacatcatttactaagatcatatagctagctagtaaatgtttgagtgaaaatacaaacaaaggttttctgactttaagagctagagttttttccactataccatattgcatctgttgtaattgttaactaatgtgcatttt

SEQ ID NO: 6761 - DNA, 200 bp, Homo sapiens
gggggactgggggaggggtagctgctatctttgagacagaaagatgcaggacagcatttcatatgtaaccatttgaatgtttttgctgtttttagaattcagagcccttgctggggggtgcctgggagatggggtaagaagagctttcatttgtctggtagatagatagcatgtaagggggtggttgtcccaggaggcag

SEQ ID NO: 6762 - DNA, 93 bp, Homo sapiens; identical to SEQ ID NO: 55
  unsure (14): n=A,T,C or G
  unsure (17): n=A,T,C or G
  unsure (59): n=A,T,C or G
  unsure (60): n=A,T,C or G
  unsure (70): n=A,T,C or G
  unsure (72): n=A,T,C or G
  unsure (78): n=A,T,C or G

SEQ ID NO: 6763 - DNA, 493 bp, Homo sapiens
aaatatatgcttttctagaatttgatgtttgaccatttatgacttaattaccagagagccagtaaattaggacagtgtttcaacaagcctaggctatctcgtaagttgaaaaatatcccactatagttgcttcatgagtatgaagtaagatggcctctgatttacactggttcaatttacaaattttcaactttatgataggtttatccgggtactaaatgcatttcaacttgatagtttcaacttatgataggtttaccaggatgtagtcccactgttgaggagcatctatttaggggttaattactttagtaataagtggaaagtaagataccttgagtaatgtttgcctataaaattgtcagcgtatttttacactattggctcaagaatgttataatgctaagggacataagttggcaaccacttggtttttggaaggactttcggtattgtattagaagtctgccctagctgttaaatttctgggtat

SEQ ID NO: 6764 - DNA, 229 bp, Homo sapiens
  unsure (25): n=A,T,C or G
  unsure (69): n=A,T,C or G
  unsure (87): n=A,T,C or G
  unsure (142): n=A,T,C or G
  unsure (143): n=A,T,C or G
gccaccctgaccaccaacagggtcnaagccggcgatgaggccgactattactgtcaagtgtgggatcgnaataatgaccatgtcgtnttcggcggagggaccaaactggccgtcctaggtcagcccaaggctgccccctcgnncactctgttcccgccctcctctgaggagcttcaagccaacaaggccacactggtgtgtctcataagtgacttctacccgggagccg

SEQ ID NO: 6765 - DNA, 372 bp, Homo sapiens
  unsure (12): n=A,T,C or G
  unsure (13): n=A,T,C or G
aaattttctggnncatgagaagaaatgtggattgctaattcaaaaagaatatatgaaaatcatatatatatactcaatttttatttacccttagagacaatgattattcattagatttttatccacaggaaatcttgtaatattttaagttttaggataatctattctcagttgctttattaacatttcagctttcctttattttaattcatttatcattttagtcattagaatgaatgcctgttatatggtagatactgtcataggcacaaaaatgaataagacacggtccctatccatcatcaaggagcttataatctgaaaaggggggtggtggcagacacataagaaactagttacaataaaaggcag

SEQ ID NO: 6766 - DNA, 79 bp, Homo sapiens; identical to SEQ ID NO: 54
  unsure (14): n=A,T,C or G
  unsure (44): n=A,T,C or G

SEQ ID NO: 6767 - DNA, 334 bp, Homo sapiens
  unsure (120): n=A,T,C or G
  unsure (172): n=A,T,C or G
  unsure (265): n=A,T,C or G
  unsure (266): n=A,T,C or G
  unsure (277): n=A,T,C or G
  unsure (325): n=A,T,C or G
aaaatgatgtaaagatgtaataaaattccttttcattgtaaaatagtaattaagtcaatttacacagacctttgtatttaatatgtctccctatttgtatagaatttcagatgggtctanatgagaaccctatgcataagcttggatcttgatgaaaggttaccaggatcangatcaaaaattgggaaatactaagctcttgaagatatttttctgatataattagattgaaaagagcaattttgaaaatgctgtgtttctccannaagtacagggngcattatttgacatcaattacttaaagaagttatgagttgttccccanacagatttt

SEQ ID NO: 6768 - DNA, 260 bp, Homo sapiens
aaaccaaaatatgtccaactgcaaagcatgtaagtaacaattttagagggtatacggaggtgaccctaagtaacaaggaatcacatatagtgagcaagcaatttgcttttcagtttttggtcaatccttatgattatttagaggagaaagctcagtttggtgctggtatatcttatgtttatcacccgacagttgttaatctctttttaacaaagaatacaggccaaggccctgtgactttagctggctttggtatttgg

SEQ ID NO: 6769 - DNA, 527 bp, Homo sapiens
ctggtggaactgggcccaggtaggggaaccctcgtgggagatattttgagggtgttcactcaacttggatctgtgctgaaaaattgtgacatttcagtacatctggtagaggtaagccaaaaattaagtgagattcaagcattgacactgactaaagagaaggtcccgttagagcgaaatgctggatccccagtgtatatgaaaggtgtcactaagtctgggattccaatttcctggtaccgagatctgcacgatgttccaaaagccttgtgatgaataaaagctttaactgctatttcagggtacagcttttatcttgcacatgaattttttgatgttcttcctgtgcataaatttcagaaaacaccacagggatggcgagaagtatttgttgacattgatccacaggtttctgataaactgaggtttgttttggcaccttctgccaccccagcagaagccttcatacaacatgacgaaacaagggatcatgttgaagtgtgtcctgatgctggtgttatcatcga

SEQ ID NO: 6770 - DNA, 232 bp, Homo sapiens; identical to SEQ ID NO: 57

SEQ ID NO: 6771 - DNA, 182 bp, Homo sapiens; identical to SEQ ID NO: 4551

SEQ ID NO: 6772 - DNA, 191 bp, Homo sapiens; identical to SEQ ID NO: 58
  unsure (18): n=A,T,C or G
  unsure (19): n=A,T,C or G
  unsure (27): n=A,T,C or G
  unsure (47): n=A,T,C or G
  unsure (86): n=A,T,C or G

SEQ ID NO: 6773 - DNA, 346 bp, Homo sapiens
ctgagtgagttccctgggagggctctcttcctggcttggagacggcctccttcttgctgtggccttacacggtggagataaagaactctggtctctcttccactttcttacaagggcactaatcccatcatggaggccccatcctcatgacctcatctaaaccaattacctcccagaggctttacctccaaataccgtcacattgggagtgacagcttcaacatgaatttggggaagacaaaaatattcagttcataagagaggcttacacaatagtctaatcaaatgacagtattgagcaggggcagtgggagcagagagaaagggacagactcaaagacatttt

SEQ ID NO: 6774 - DNA, 545 bp, Homo sapiens
ctgtgttcttaggggttctgagggccatgcagctctgttgcaccatgattctgtcttctctcttgcccactgcctgaaggaaatttggagtgggctgggcccagagctcccctgtatagcaggccctgtcctggagggcctggcagggacatggcttagcctgttggcccctagtcccgagacctcataggccacaggggtccactgtggcttgtttgggcctggggtggggctcatggagtggtgggtgttggactgagactctgaccagggacagggggatggggtcacagccaagccactccacccctaccccatgcacacagcactcagagcccagaccctctcctaagagcccccaccaaaatcctctctaggggcaggggatagagcaagacatgtcccccacccagagcaggggctgcggtcagggagctcaggggactcagccactccatggcagagccctgtttaatacaacttgtgtctgggatggcctggatcagagaccctatctaaggagcatgttcagaaaccatgttgct

SEQ ID NO: 6775 - DNA, 517 bp, Homo sapiens
ctgaggcttggaaacgtttcttgtgttgccctgaaaaatctttgagacctcagggaggctctgtctctcttaaaaggtggagaaagatgccattctctccctaaggtctggtggagtctccccatcttgcatacccttctgcaagccatctatctctgctcactctccaattgacccgcctgggaacaagggatgaggaggagttgggggctggggggaatcctgccagtgggtgaagccctgtggcaggaaggtatatgtggacatagagtatacctgattctctttcttcagccactgactgcttgggttgggctgtgaatgataatggaatggctggagtctgctgttgtcagaaggcagggagggtgatgaaggactgacccacatggactgggatgtgtgtcggttatgggcatgactgcacgttcactctcagtgggatctgggcaacatggagttcattgtcctgttgcttacttactgcaatgtctttggccctccttttcaactggtt

SEQ ID NO: 6776 - DNA, 426 bp, Homo sapiens; identical to SEQ ID NO: 56
  unsure (9): n=A,T,C or G
  unsure (155): n=A,T,C or G
  unsure (156): n=A,T,C or G
  unsure (166): n=A,T,C or G
  unsure (196): n=A,T,C or G
  unsure (339): n=A,T,C or G
  unsure (393): n=A,T,C or G
  unsure (409): n=A,T,C or G
  unsure (416): n=A,T,C or G
  unsure (417): n=A,T,C or G

SEQ ID NO: 6777 - DNA, 526 bp, Homo sapiens
ggaagaggcgtcccaggaagccggcctgccggcaggagcgggccccagccccacctttccagccctgggcatcgggatggactcctgcgtcatccccctgaggcacgggggcctgtcactggtgcagaccacggacttcttttaccccttggtagaagatccctacatgatggggcgcatagcttgtgccaacgtgctgagtgacctctacgccatggggattactgagtgtgacaacatgttgatgttactcagcgtcagccagagtatgagtgaggaggaacgcgaaaaggtaacgccactcatggtcaaaggctttcgggatgcggctgaggaaggagggacggcagtgaccggtgggcaaacggtggtcaacccttggattataatcggtggagttgccactgtagtatgccaaccaaatgagttcataatgccggacagcgccgtcgttggggacgtgctggtgttaaccaaaccgttaggaacccaggttgctgtcaatgcccaccaatggctggataat

SEQ ID NO: 6778 - DNA, 638 bp, Homo sapiens
ctgcttcagactaccaaactggtggaagaacatttggattctgaaattcaaaaactggatcagatggatgaggatgaattggaacgccttaaagaaaagagactccaggcactaaggaaagctcaacagcagaaacaagaatggctttctaaaggacatggggaatacagagaaatccctagtgaaagagacttctttcaagaagtcaaggagagtgaaaatgtggtttgccatttctacagagactccacattcaggtgtaaaatactagacagacatctggcaatattgtccaagaaacacctcgagaccaaatttttgaagctgaatgtggaaaaagcacctttcctttgtgagagactgcatatcaaagtcattcccacactagcactgctaaaagatgggaaaacacaagattatgttgttgggtttactgacctaggaaatacagatgacttcaccacagaaactttagaatggaggctcggttcttctgacattcttaattacagtggaaatttaatggagccaccatttcagaaccaaaagaaatttggaacaaacttcacaaagctgggaaaaagaaaactatccgaggaaagaaatatgattcagactctgatgatgattagagctca

SEQ ID NO: 6779 - DNA, 410 bp, Homo sapiens; identical to SEQ ID NO: 60

SEQ ID NO: 6780 - DNA, 332 bp, Homo sapiens
cctgattctcgcgattattctcgaatcacctcctgtgttgtgctgggagcaggactgattgaattacggaaaatgcctgtaaagtctgagtaagaaacttcatgctggcctgtgtgatacaagagtcagcatcattaaaggaaacgtggcaggacttccatctgtgccatacttgttctgtattcgaaatgagctcaaattgattttttaatttctatgaaggatccatctttgtatatttacatgcttagaggggtgaaaattattttggaaattgagtctgaagcactctcgcacacacagtgattccctcctcccgtcactccacgcag

SEQ ID NO: 6781 - DNA, 385 bp, Homo sapiens
ctggcttccgagaggcaattctgtccttggaagccaggtttgaccatctgtaatcagccttgtgagaagtctcgtttgagggggccagggatggaacgggagggcgcatatcgtatgaggtatgggcattgtgttaagctgggggaagttgcagcttgtcctgaattacatggagaggaataaagtgggtgagtaggaggagccatttcatctgaaagcctgaggcccctctggtcccctcgataaaccccactggtgtcccaggccacaggtaacaggagaatagacatttaatgtcacagaatgtcagagcaggcaaggccttcagtgatcactctttctaggcttaggacgggttggggttagaaagggtgatcactgaagg

SEQ ID NO: 6782 - DNA, 482 bp, Homo sapiens
ccacaagatatgttctagagacgtccatgagtcctcttgctgtgtgggagcggcatccacagacttctggaataattggcctgtgaggaagctcatcaaagctgcaaacagtacaatgaatgcaatagagagccagagggccttattagcctttctgatggaggacttgagatttgttgcccaggaagctattgtgtcataaactgaagagacatcccactttgatggattatttttcttttcagaaagacttggcttccttgtcctttctactgtttcttctccagatggctctgagtcatctttagttctgtaaataaatgttgtttttaatatttgaaactaaggataatatgctataattattcataaaatattgctgaatcttactgtaactcaagaggctcacaaatatttgttctgttttagggaaagttgataaatatctaactctaaaaatcaaatcaccagatttataattt

SEQ ID NO: 6783 - DNA, 309 bp, Homo sapiens
ccatctgtccagcaggggctccagcagtcctttttgcacactctggattcttaccggatattacaaaaggctgccccctttgacaggagggctacatccttggcgtggcacccaactcaccccagcaccgtggctgtgggttccaaagggggagatatcatgctctggaattttggcatcaaggacaaacccaccttcatcaaagggattggagctggagggagcatcactgggctgaagtttaaccctctcaataccaaccagttttacgcctcctcaatggagggaacaactaggctgcaagacttt

SEQ ID NO: 6784 - DNA, 254 bp, Homo sapiens
  unsure (41): n=A,T,C or G
  unsure (184): n=A,T,C or G
aaatgaatttggggaaggaagtgcgctggagaaatccttanctgtcagccaaggtggagagctctatgaagagtggctggaacttagaaacggttgcctctgctgttcagtgaagtgaggaatgtgtttactgtgtacatggtttactagaaatgtttattgattatatttccagctttaattntcttgagtaatttaactgaatttacacagtttgcttcattgtattttcaaacaaatagaaaataaactta

SEQ ID NO: 6785 - DNA, 259 bp, Homo sapiens; identical to SEQ ID NO: 59
  unsure (132): n=A,T,C or G
  unsure (149): n=A,T,C or G
  unsure (151): n=A,T,C or G
  unsure (188): n=A,T,C or G
  unsure (207): n=A,T,C or G
  unsure (209): n=A,T,C or G
  unsure (211): n=A,T,C or G
  unsure (227): n=A,T,C or G

SEQ ID NO: 6786 - DNA, 415 bp, Homo sapiens
  unsure (336): n=A,T,C or G
cctacaaggagtcctacaaagaccggcggcggcgcgcacacactcaggctgagcagaagaggagggacgccatcaagagaggctatgatgaccttcagaccatcgtccccacttgccagcagcaggacttctccattggctcccaaaagctcagcaaagccatcgttctacaaaagaccattgactacattcagttttgcacaaggagaagaaaaagcaggaggaggaggtgtccacgttacgcaaggatgtcaccgccctaaagatcatgaaagtgaactatgagcagattgtgaaggcacaccaggacaaccccatgaaggggaggaccaggtntctgaccaggtcaagttcaacgtgtttcaaggcatcatggattccctgttccagtccttcaatgcctccatctcagtgg

SEQ ID NO: 6787 - DNA, 327 bp, Homo sapiens
ctgacatctggagttcatagcaccataaaggttattaaggccaaaaaaaaacatagagaagtaaaaaggaccaattcaagccaactggtctaagcagcatttaattgaagaatatgtgatacagcctcttcaatcagattatctaggggaagctccagcttctcatctgcttgatttgagtcccatggagaagctctgatatgtggtaaggtggaaaaatatgacacggtgcgatcaaggcattagaggatgaagctattgaagtgaaaacaaaattgaagaggcaaattcttttgagcagagggtaatttttttcttatttcattt

SEQ ID NO: 6788 - DNA, 132 bp, Homo sapiens
  unsure (24): n=A,T,C or G
  unsure (98): n=A,T,C or G
gtgagtccaaactccagagaaagntgtgtgtgtgtgtgtgtgtgtgtgtgtgtgtgtgtgtgtgtgtgtttgtgtgaggtctgggggcttccccccanatgggtgtgagtgcatggtcctactgtacacaca

SEQ ID NO: 6789 - DNA, 342 bp, Homo sapiens; identical to SEQ ID NO: 306

SEQ ID NO: 6790 - DNA, 269 bp, Homo sapiens
ccactcctggaaacccactgatagatgagtttcccccattcttctggcctccgccacatgatcaggaagctggacttgctcttatccaaccactcgaggttccctttcttcctcagttcctctaatacaatctggatcgactccacaggaagctttcgctgtagcttgacgttgttgaagagcgggctctcctgagcttccatcaccgtcatgctggactgtttgtgcaggcggcagaaggacaggaccagcgagcaccaggcggccag

SEQ ID NO: 6791 - DNA, 361 bp, Homo sapiens; identical to SEQ ID NO: 61
  unsure (9): n=A,T,C or G
  unsure (10): n=A,T,C or G
  unsure (30): n=A,T,C or G
  unsure (72): n=A,T,C or G
  unsure (205): n=A,T,C or G
  unsure (282): n=A,T,C or G

SEQ ID NO: 6792 - DNA, 298 bp, Homo sapiens
aaatgactgtgctgcccctttcacatcaaagaactactgacaacgaagtccgcgcctgcctttcccatctgtctatctatctggctggcagggaaggaaagaacttgcatgttggtgaaggaagaagtggggtggaagaagtggggtgggacgacagtgaaatctagagtaaaaccaagctggcccaaggtgtcctgcaggctgtaatgcagtttaatcagagtgccatttttttttttgttcaaatgattttaattattggaatgcacaatttttttaatatgcaaataaaaagttt

SEQ ID NO: 6793 - DNA, 262 bp, Homo sapiens
aaaggtatgtctcagtctggatttgaaacctcttagtatcaacaggaagaaacgttttgtatctattacaatgaggaaatctttttcaaaagatatttgggacaaagtacttccatccattcctgctctccaagctttcaagccctccccaggggttaaataggaaatgtatgtttgctggcctcctcaccgtccaacgtgacatttttttggtaccatctattctgctgtaatagaactaaatcatccatcgatgtcccag

SEQ ID NO: 6794 - DNA, 345 bp, Homo sapiens
cgctcagctcctggggctcctgctgctctggctcccaggtgccaaatgtgacatccagatgacccaatctccttccaccctgtctgcatctgtcggagatacagttacaataagttgtcgggcctctcagaatatagatcggtggttggcctggcatcaacagaaaccaggcaaagcccctaatgtcctaatttatgcgacttccagtttagaagaaggggtctcattaagatttactggcagtggatctgggacacaattcaatttaaccatcaccagtctgcagcctgacgattcagcaacttattattgtcaacattattctgcatctcttcgcagttttgg

SEQ ID NO: 6795 - DNA, 341 bp, Homo sapiens
ccacagctaacatcattgcagcacctttactccttcggctttttgccagcaccaacattggccccttccaggatagaccctcaagagcccactcactctaaaccactagccccaatggagctggagccaatgtacagcaatgtaaatcctggagatagcaacccgatttattcccagatctggagcatccagcatacaaaagaaaactcaggtaagatgcctttcaggcaaatagaggtgaggtggcagtgttttattgaaacgggcaaggggtctttgatcagagttatttcaaatacaagcccaacacgcaaggcattacttgcctcccatagtgtcag

SEQ ID NO: 6796 - DNA, 244 bp, Homo sapiens
aaagggaaaagtaaatttaacagttgcctttttttttaatgtcagggcagatcttattttacagtacagtgggggaaatagaaacatgtgaaaggcaaaaggcaggctcctaaattaatgtcagtgaagttcagggtgggcaaatgagtgtgtgtgaggtataggaaatgctgatgacttctttaatgcttgaagtccgttcacaggtatctagccctagaatgcctagaacaggaagaggcag

SEQ ID NO: 6797 - DNA, 437 bp, Homo sapiens
ctgtctcaaaacaaacaagcaaaaatacaaagaaaaatctggttatcaactgaaggctttcagcagaagcagcaccaccattatgtgttttgttttgttccctgacatatcccagattagaatagtaccttacacaggtgatcaataaatgttaaacagatgacagcacttaatagcatgggctctgacaagcagttagcactcaataaacacttattgtgtaatggtttgttttgttcacggacgtatatgaagcactagaacagtggctgctaacagagtagggctgaataaatatttgttaaacaggtgaaaacaattagtaaaaaaggacctagcacaaaatgagctctcaatacttatgtaatactttgctgagtgtctagaattatgtctgtcatatagtaggtggtcaatatacctaacttgttaaacag

SEQ ID NO: 6798 - DNA, 371 bp, Homo sapiens
ccatcggcctggtgggcttcctcgtgggcaccgtcctcatcatcatgggcacatatgtgtccagtgtccccaggtaatgatccttctgagagaaatgacttgtgggagacaccctgcagatcctcatgggtttgtgacagaccctgcgtgctcagtgccctttaagtgcatcccgctgtgctgactttgagtgggatcaacatctgtcctacgggtcccctcttttttggccccagtattcatggcagggtttgttggacacctactagcttcccttcccattcaacacacacacacattcttgctctacccaaagctctggctggcagcactaaatgctttggtggtgtttgcactgtgtcctttccagg

SEQ ID NO: 6799 - DNA, 216 bp, Homo sapiens
aaaagtaatacttggtgctaagaatttcaggattattgtatttacgttcaaatgaagatggcttttgtacttcctgtggacatgtagtaatgtctatattggctcataaaactaacctgaaaaacaaataaatgctttggaaatgtttcagttgctttagaaacattagtgcctgcctggatccccttagttttgaaatatttgccattgttgttt

SEQ ID NO: 6800 - DNA, 368 bp, Homo sapiens; identical to SEQ ID NO: 62
  unsure (211): n=A,T,C or G
  unsure (244): n=A,T,C or G
  unsure (320): n=A,T,C or G
  unsure (327): n=A,T,C or G
  unsure (334): n=A,T,C or G
  unsure (342): n=A,T,C or G
  unsure (348): n=A,T,C or G

SEQ ID NO: 6801 - DNA, 383 bp, Homo sapiens; identical to SEQ ID NO: 63
  unsure (260): n=A,T,C or G

SEQ ID NO: 6802 - DNA, 389 bp, Homo sapiens
ctgctgttgtgaacttcattctgccttttctttctaattctctgggtccagatctgtttacaccacctcctggtacaacacccctaagagctgactttggcagttgtgtatctctgttactggggcttgaattaaacatcttagtgaacaaactttagctttactcttcaatactgaaaaaaaaaatgttatgcccatggttaaaccagtatcctactcaatccttctgtgatgttactcacaaaatgaattgcataaaatcggatacctgagattgttttggctgggaggatccttgaattataaagattaaattagattaatcaggaatgacctctgttactccttatggggacattcaacttctgactgaactttttttttccttt

SEQ ID NO: 6803 - DNA, 547 bp, Homo sapiens
ccaaaactcttccttttggaaccacatgaaagtcttgatgctgctgccatgatccctttgagaggtggctcaaaagctacagggaactccaggtcctttattactgccttcttttcaaaagcacaactctcctctaaccctcccctcccccttcccttctggtcgggtcatagagctaccgtattttctaggacaagagttctcagtcactgtgcaatatgccccctgggtcccaggagggtctggaggaaaactggctatcagaacctcctgatgccctggtgggcttagggaaccatctctcctgctctccttgggatgatggctggctagtcagccttgcatgtattccttggctgaatgggagagtgccccatgttctgcaagactacttggtattcttgtagggccgacactaaataaaagccaaaccttgggcactgttttttctccctggtgctcagagcacctgtgggaaaggttgctgtctgtctcagtacaatccaaatttgtcgtagacttgtgcaatatatactgttgtgggttg

SEQ ID NO: 6804 - DNA, 309 bp, Homo sapiens
cagcaaggaacacaaaggcatctgccacctgagcaagtatcgaacaccatcacctgcatccttcaagggttccaggtagatctccagcctcttgtaggagagaaccaagttgaaaaggtcaaacgctggggacttggtaggaaaaggtggagactccaggggagcctcgggcatcacgctggggctcagctccggcccactcccctcacgttctgatgtctgcatcccggccgctggctccgtgagggaggcggcagggtcgggcaggagcaggggtagagccactgggccccggagcgtttcttcagg

SEQ ID NO: 6805 - DNA, 435 bp, Homo sapiens
ctggctgaaggtggaaggatggtgtattccacgtgttcactaaaccctattgaggatgaagcagtcatagcatctttactggaaaaaagtgaaggtgctttggagcttgctgatgtgtctaatgaactgccagggctgaagtggatgcctggaatcgcacagtggaaggtaatgacgaaagatgggcagtggtttacagactgggacgctgttcctcacagcagacacacccagatccgacctaccatgttccctctgaaggacccagaaaagctgcaggccatgcacctggagcgatgccttaggatattaccccatcatcagaatactggagggttttttgtggcagtattggtgaaaaaatcttcaatgccgtggaataaacgtcagccaaagcttcagggtaaatctgcagagaccagagaaagcacacag

SEQ ID NO: 6806 - DNA, 227 bp, Homo sapiens
ctgggttttgggagaaaggagatgctaccaagtcttggatgttagggcgagaccctgcaagttgagtattagagagcttgtctttcaaggcaggttcctggggcttcagggctaggagggaggagcctgcccttttaacagaaccccagtcacatgcggctcaagtcactcagaggctgttgcatttcagggctatgttggtcctttgtttacctcctaaaccacag

SEQ ID NO: 6807 - DNA, 347 bp, Homo sapiens
aaaaagcattcagattaagagattgaaaagagcgaggcatctaaggctggggggtggggaaggaaaagctgtggagcactacccctcccccaggccacaaaagtcaagggatgtctcttccactggtagcctcaccacacagcttactgaaatcaacaatgttaaatatttagcttcacaaactctgtaaaaatgagttgttgtgacctacaaaaaaggtatatacatattttacataatacaatatcttaaaggtcatatttacaaaaaaatctattcacagaaacactgcgagattctgattcagaatgcagtacctggccttgggttttcagaagtttattttt

SEQ ID NO: 6808 - DNA, 299 bp, Homo sapiens
tccacctcggagagctgggccaggcgcggggccctgaggctcacgtccatctcgtccccgatgcaggccagccgcagggccaatgcgtcactgccctccatgcattccaaagaatcgaagtcctccatagggtccaggtcctcttcagagtcagtcatgccaagaacctccatggtcgggggttccaggagctgctcatacaggagggtctccatcaagatgtctctggagaggggtcttacttcagacatttctcctctggcggcggcgatgctggcagcgtctgtaagccacccggg

SEQ ID NO: 6809 - DNA, 306 bp, Homo sapiens
  unsure (260): n=A,T,C or G
cgctgcgttacccggaaccgccgggccgaacagcatgacgtccgctttggagaactacatcaaccgaactgttgccgttattacatcagatgggagaatgattgtgggaacactgaaaggttttgaccagaccattaatttgattttggatgaaagccatgaacgagtattcagctcttcacagggggtagaacaagtggtactaggattatacattgtaagaggtgacaacgttgcagtcattggagaaatcgatgaanaaacagattctgcgcttgatttggggaatattcgagcagaaccttt

SEQ ID NO: 6810 - DNA, 226 bp, Homo sapiens
ccaagatgtggatgtgaccaccaacccagatgaggaacttgatggggatgaccgctatgacttcgaggtggtccgctgcatctgtgaggtccaggaggaaaatgacttcatgattcagtgtgaagagtgccagtgctggcagcatggggtctgcatgggattactggaagaaaatgtgcccgagaaatacacctgttatgtttgccaagaccctccaggtcagagg

SEQ ID NO: 6811 - DNA, 456 bp, Homo sapiens
aaaatcccagtttcagggaacaggactcaggtgggagccacgcctaaaagccttccacagagagagtgtggttaagcgcataggcgtcgctatcctcttcctccaaaagcagcttgtcgatggtcaacgagctggcggctcttctggggtcttccatgtcctgaaggactggctctgggatagagatggggagctggacaaactggggcccaggtagggctggggccggaggctggtactgcagggtggaggtgggtagtgtggaaaggggctgaggccacgggaaataggtgaggggtgcctggtgctctgggccctccagcgggggccccactgcgggcgtggcggagcttcctgtcgtgacattggtgatgagtggcggagaggcataggtcaacactgaggagggccccaccaccgtgtagccggggcacacgggctgcacatacatgtcag

SEQ ID NO: 6812 - DNA, 301 bp, Homo sapiens
ccagaaccttggcctggtccacagcgtcgagcaggttcttggcgtccacagccagggtgtgtgaagccgtcagcatctgcctcttgcactcctcactcagggaggtcacggcgttctgctgcgccagccgcatcttgttgatgagctctgccaggtctttgttgagcagtttctgggtgccctcgatctctgtccgtgaagatgacggcaaggaaggcaggagatcatccacgctcccgatgagcttccgcagggtcagccccacattcttcaccaccaccacgtagccctcggggggcag

SEQ ID NO: 6813 - DNA, 443 bp, Homo sapiens
ccatggagaaacgcagagcagtccagaaccagtggcagctacaacaggagaagcatctgcagcatctggcggaggtttctgcagaggtgagggagcgtaagacagggactcagcaggagcttgacggggtgtttcagaaacttggaaacctgaagcagcaggcagaacaggagcgggacaagctgcagaggtatcagaccttcctccagcttctgtataccctgcagggtaagctgttgttccctgaggctgaggctgaggcagagaatcttccagatgataaaccccagcagccgactcgaccccaggagcagagtacaggagacaccatggggagagaccctggtgtgtccttcaaggctgttggtctacaacctgctggagatgtaaatttgccatgacttcctggaggacagcagcatggagaaagatcctagaaaagg

SEQ ID NO: 6814 - DNA, 448 bp, Homo sapiens
ccaggtggccctccgtgtgaggtcatggtcacagcatagtttggagctagggagggactgtcagcctggaggtttggagactcattctggaatctagtgtgggtcaagccaacttcagggagaggctgagccagggtaggagtcacaggagcagacgaggatgtggggtgccgtgcacagagctccatgaccagcttgggaagttagaaggaaggggaggcaggaggctgcttagtctgctgccatgatgggccccatgaatggtggctctcaagcttctgtgctacacaggggtgtgtggttgggcgagtgtccttgttaattgatacctaattggccttggttgggaacatagccatgagtgcccctcgtgggtggggcgccagtctgtcattgacctcattgtgtcagcaccttccccccaaggaggctgaccctgccctgccag

SEQ ID NO: 6815 - DNA, 545 bp, Homo sapiens; identical to SEQ ID NO: 307

SEQ ID NO: 6816 - DNA, 393 bp, Homo sapiens
ctggagagagatcaatatgctgaacaaataaaaggagagagggcccagtggcagcagaggatgaggaaaatgtcgcaggaggtttgcacattgaaggaggagaagaagcatgatacgcatcgggtagaggagctggagaggagcttgtccagactcaaaaaccagatggctgagccactgcccccggatgccccagcagtgtcctctgaggtggagctgcaagacctgaggaaggagctggagagagtggcaggagagctccaggctcaggtggaaaacaatcagtgcatcagtctcctgaaccgtgggcaaaaggagaggcttcgcgagcaggaggagaggcttcaggagcagcaggagaggcttcgggaacgggagaagaggcttcagcag

SEQ ID NO: 6817 - DNA, 332 bp, Homo sapiens
ctgctcacctcactggtctaaacactcatgggctaaccttgtcctagtccatgatttcagtggtgtttggaaaagatgatttttctaactcagtcactcattcacatttatgggccgacattcctttttgttgttgtttttttgagacagagtctcattctgtcacccaggctggagtgcaatggtgcgatctcggctcactgcaacctctgccttctgagttcaagcaattctcctgcctcagcctcccaagtagctgggattacaggcgtgtgccaccacacccatctaaagtttgtatttttagtagagatggggtttcgccatgttgg

SEQ ID NO: 6818 - DNA, 244 bp, Homo sapiens
ccagaaacatttggacaactgtgtctcaaaaacagtgtgttctcgtttcgcttctgtgcctcagtctttaagatacaaaactatctcaggacaccacatcctgggcccagcctgcagagtggtcacttttctgccactgccctcaatatgagggagcactgaaaggctcttgacttagaaccccttcccctttctgtctaaagccgaggagccatctgtggttgcgagcacgcagcacaccagg

SEQ ID NO: 6819 - DNA, 429 bp, Homo sapiens
ccaggtggctcatgcagtcaccggagctttgcttcaggacatgtgtgctacaagtccaggctggacaaccccaagaactgtgagggttcagcaagcggggtgggtccactgagctctcaacacaagcttccgggacccagaccctcatctggaaaccacacaggccagccctgcgatgctctgtgtagcagggagcaagggtcacaccacagccacatctgcttcattcgggggatccaacttggcatgtcttggtaaaggcattcatggtgctgcccaggacaccagcaagcactgaagtcctcacaagttacttcaggagtttaaccctgcacacgcccaacagaagggttttcaccagctctgagcctggacacttacaggcacactgtatgttcaagtcagttattctgtctccatctagaaagg

SEQ ID NO: 6820 - DNA, 103 bp, Homo sapiens
ccagggcgtgtaatgacttcagtattggcctcgtgttgttggtactcactatccgatccaggcagggaaatggtcagtgcgtgtgtgtcgggtggggtggggg

SEQ ID NO: 6821 - DNA, 302 bp, Homo sapiens
ggcccggcgatgtcgctcgtgctgctaagcctggccgcgctgtgcaggagcgtcgtaccccgagagccgaccgttcaatgtggctctgaaactgggccatctccagagtggatgctacaacatgatctaatcccgggagacttgagggacctccgagtagaacctgttacaactagtgttgcaacaggggactattcaattttgatgaatgtaagctgggtactccgggcagatgccagcatccgcttgttgaaggccaccaagatttgtgtgacgggcaaaagcaacttccagtcctacag

SEQ ID NO: 6822 - DNA, 571 bp, Homo sapiens; identical to SEQ ID NO: 625

SEQ ID NO: 6823 - DNA, 277 bp, Homo sapiens
gcttgaaggaatttcacttccttgggtgctggtaccttattcacagcagatggtcatgcttagaaaaccctgcttcagggtcagtgactgaaaaaccaggggtgccatgccagtgcctttgtcagggctgttttctgcttaaccactttctcagaataatgcagaagaaacccagtccgctaccttttgagtgtgtgggaaataagaacggggtgggagaggagatgggagatgcaggtcgaaggacaaaaaggagcagatgagcaggatgaacagg

SEQ ID NO: 6824 - DNA, 287 bp, Homo sapiens
cctgctctcctcacacattgtgtggtttggggttaatgatggagggagacacctcctcatagacggcaggtgcccacctttcagggagtctcccagcatgggcggatgccgggcatgagctgctgtaaactatttgtggctgtgctgcttgagtgacgtctctgtcgtgtgggtgccaagtgcttgtgtagaaactgtgttctgagcccccttttctggacaccaactgtgtcctgtgaatgtatcgctactgtgagccgttcccgcctagccagggccatgtctta

SEQ ID NO: 6825 - DNA, 334 bp, Homo sapiens; identical to SEQ ID NO: 65
  unsure (183): n=A,T,C or G
  unsure (192): n=A,T,C or G
  unsure (193): n=A,T,C or G
  unsure (203): n=A,T,C or G
  unsure (211): n=A,T,C or G
  unsure (227): n=A,T,C or G
  unsure (228): n=A,T,C or G
  unsure (235): n=A,T,C or G
  unsure (244): n=A,T,C or G
  unsure (245): n=A,T,C or G
  unsure (313): n=A,T,C or G

SEQ ID NO: 6826 - DNA, 214 bp, Homo sapiens
ccacaccttgatgaaatcattttcctcctcgacctccaactggcatcactctggatctcaattttgatatttaccaccacaccaagtatgttccttcacatgtccatacctagttttctttttttctaaataataagtgatcctcccacttcagcctcctgagtagctaggactacaggtgcacaccaccatacccaactaattttttgttttt

SEQ ID NO: 6827 - DNA, 377 bp, Homo sapiens; identical to SEQ ID NO: 66
  unsure (335): n=A,T,C or G

SEQ ID NO: 6828 - DNA, 330 bp, Homo sapiens; identical to SEQ ID NO: 308

SEQ ID NO: 6829 - DNA, 373 bp, Homo sapiens; identical to SEQ ID NO: 6

SEQ ID NO: 6830 - DNA, 80 bp, Homo sapiens
aaacaagaatgaatcattactgtgtatgttagggtattaaaactgtttcaccagtacagtgaaagttgtttcaacatttt

SEQ ID NO: 6831 - DNA, 281 bp, Homo sapiens
cctcagaccgggttctgagtacacagtcagtgtggttgccttgcacgatgatatggagagccagcccctgattggaacccagtccacagctattcctgcaccaactgacctgaagttcactcaggtcacacccacaagcctgagcgcccagtggacaccacccaatgttcagctcactggatatcgagtgcgggtgacccccaaggagaagaccggaccaatgaaagaaatcaaccttgctcctgacagctcatccgtggttgtatcaggacttatggtgg

SEQ ID NO: 6832 - DNA, 159 bp, Homo sapiens
aaattttacatgctgaaaagctgcagagcagaggaaccaaaccaggtttatttgtgctaccaggaggtgttcttaatgggaacaggcctcctatctttagtcactttgtacaggatgatatccatgagtactttagtgtttgtatatgttttttctttt

SEQ ID NO: 6833 - DNA, 465 bp, Homo sapiens
aaaggtggagcttttcaaaaagggaaactgggagcacttacagcccaggtctatgttactggtaagaagtggtttgtctcaggaataatgtaccctgtggagagtactttgtgtcagcctcactgagaacaaaaaaagcactcctttccccatgattaacactcatgtgtcaggaaagtacagtcaatgtatgctaaaaatccacttgaacaattagctcgcttttttccctcatttgctttcagagtaaatgtgctttcagagtattaggtcggcctaatacatgatacattttaagaaggggaggaaagcgcattgtataccctgatgctgggacccaatagaagacaggccccctggctggcctttggttctccctggagctgacaaagggaaggggcttggaaagcagccactgtccccgcctagtttgggcctttacagacacacctttccttttggcag

SEQ ID NO: 6834 - DNA, 536 bp, Homo sapiens
cctggcatttcctactggatgttctctcaataattgtgctgcccattatactcccaatgccggtgacacaacagtattacagtatgatgacatctgtaaaatagactttggaacacatataagtggtaggattattgactgtgcttttactgtcacttttaatcccaaatatgatacgttattaaaagctgtaaaagatgctactaacactggaataaagtgtgctggaattgatgttcgtctgtgtgatgttggtgaggccatccaagaagttatggagtcctatgaagttgaaatagatgggaagacatatcaagtgaaaccaatccgtaatctaaatggacattcaattgggcaatatagaatacatgctggaaaaacagtgccgattgtgaaaggaggggaggcaacaagaatggaggaaggagaagtatatgcaattgaaacctttggtagtacaggaaaaggtgttgttcatgatgatatggaatgttcacattacatgaaaaattttgatgttggacatgtgccaataa

SEQ ID NO: 6835 - DNA, 553 bp, Homo sapiens
ctggagcagaaggcggcccgttcacttcagccagatccacttgtctcccacctcggtgttgtacccagggctgtacttgcggcccggcagctctctgaactgatgtaagacacggtcagtctgatgagctccaatggtgacttccgggagaaagataggaatgcttgtgtaattcagcacctcaaacttatcctgaaccagtaatcgcaggtggtataaagtgcgattgtcctgcttgagccacggccctttatcgaacttcaggtattcaatgtcctctaccaccttttttgaatcttgagcttcccttgcagaatattgtaaaacctcacatttttcactcatctcagggagaaaggttttcttataggcattctcaatgtcctgtagataggcagaggtgatcttcatttcatgtggctaaacagaagcagaaaaatcaaactgggaaacatttagagttcattctctttgacctgtgcgtatataaaatgcgaagacaatcactgaccaccaatttcttacaactcacaccgggcactgtggggactgc

SEQ ID NO: 6836 - DNA, 251 bp, Homo sapiens
aaatgaaatttgaaaaccaaatagtaagaaatggaaagagatagttgtaagaatccatttaccaattttacagctaaaaattaaagtgaagtagaaatagcaaaagataacagacaaatatattattttaggtcattaatttatagtgccttatcatcttaagttataaatagaataaggattttgttatataaaaactatcaaaaaagtatcagtgaaaagacatgacctccatgaaatgtgctgagtgg

SEQ ID NO: 6837 - DNA, 443 bp, Homo sapiens
  unsure (159): n=A,T,C or G
aaaaatatttttagtagagatgggttttcgccatgttggcacactggtctcgaactcctggtctcaagcaatccacccccctcagccttccaaagtgctgggattacaggtgtgagccacaacacccggccggctcttttttttttttttcttctttanagacagggtttcgtgctgttgcctaggctggagggcagtggtgcaatcatagctcaatagctcactgcagcctcaaccctctggctcaagtgatcctccctgctcagcctcccaagtagctgggactacaggggcgcaccatcacaataactaattttttatgttttgtagaaagggagtcccactatgttgcccaggctggtctcaaactcctggcctcaagtgcaccatcacacccgactaatctttgtatttttagtagagatggggtttcaccatgttgg

SEQ ID NO: 6838 - DNA, 289 bp, Homo sapiens; identical to SEQ ID NO: 4564

SEQ ID NO: 6839 - DNA, 300 bp, Homo sapiens
ccataaagatgattttgtcatcacaaaagaccatgatagtatcagttagttcataaccaaagagccatgtctgtaaggcagttgatttggcataaacaatttcttcatcaacacccactgatacaacaatggcatcaacgttggcatactcatcttctcctttccgccaattgctgtacagtctcttcactcgccgataataagcgtctttgtccagagtcacagccatagccccggacgccgcttctcctcgggttccgagaatcacgcgaggtcccggctcagccacccgctctcggc

SEQ ID NO: 6840 - DNA, 240 bp, Homo sapiens
aaatatgggaaggcaatgcagaactcttgggaattatcgagttctgataccccaaaagaatgaaatcaaacttctgttaatgggatgatgggtcgtggaatgggacaccttgggcacttgctaacaggaacataggaaaattggagttgaaacttcgcaggctctgtaacgaatgtggatgactgctacagaataaggctgacttcctgtaattatgatatttagtaacgcgatgtgttt

SEQ ID NO: 6841 - DNA, 51 bp, Homo sapiens
  unsure (32): n=A,T,C or G
gatcctgcgttaatctatgactatgccattgngctattcaagggtcaagga

SEQ ID NO: 6842 - DNA, 189 bp, Homo sapiens
ccaaataaccaaggtgaagaaaggtaaggggaagaaaaaaaaagaaaaaaaagggctgtatccaaacaaaaacaactcgagatcagagaattggtctatatttcattaagataaattgtttcaaatgaaacatttggtaattgagaatactactttaatatctgagctacttagggccctttccttttt

SEQ ID NO: 6843 - DNA, 463 bp, Homo sapiens
  unsure (15): n=A,T,C or G
  unsure (16): n=A,T,C or G
  unsure (28): n=A,T,C or G
  unsure (74): n=A,T,C or G
  unsure (113): n=A,T,C or G
  unsure (156): n=A,T,C or G
  unsure (178): n=A,T,C or G
  unsure (263): n=A,T,C or G
  unsure (350): n=A,T,C or G
  unsure (355): n=A,T,C or G
  unsure (371): n=A,T,C or G
  unsure (387): n=A,T,C or G
  unsure (390): n=A,T,C or G
  unsure (391): n=A,T,C or G
  unsure (414): n=A,T,C or G
  unsure (421): n=A,T,C or G
  unsure (423): n=A,T,C or G
  unsure (426): n=A,T,C or G
  unsure (435): n=A,T,C or G
ctgtgcgtggaccanntcagcttccggntgtgactggagcagggcttgccgtcttcttcagagtcactttgcangggttggtgaagctgctcccatccatgtacagctcccantctactgatgtttaaggatggtctcggtggttaggcccactanaataaactgagtccaatacctntacacagttatgtttaactgggctctctgacaccgggaggaaggtggcggggtttaggtgttgcaaacttcaatggttatgcggngatgttcacagagcaagctttggtatctagctagtctagcattcattagctaatggtgtcctttggtatttattaaaatcaccacancatanggggactttatgtttnggttttgtctaagagntannttatctgcttcttgtgctaacanggctgtngntgntagggcccnttatacctgggggccagcctttggaaat

SEQ ID NO: 6844 - DNA, 520 bp, Homo sapiens
cctggcagcactggagggcaggcagggaaagtagggtgggtaacccagcctggcaaatgcacggcagctagaaaacctcttcaggttctggggtggctgggccatgagaggggaggccaggcagggctgtcaaggtaaccggggtcagatcatggagttgcctgccaggctccacaggagtgggggacagaagcagagcaacccagctaccagccgggccctgagctccctcagggtgaccagggaggagctgtgactggctggggaggcagggctggggccgaggttccccaggacgacaggagggagccaaggcactctaagaggtggaagaagaggaccagaagctggtgagtgcatcactggagcccataggagggctcctgactgtcctcaaaagcctcagacctcagtgtccactttctccatccaagaaatggggctgtgatctctgcttatgacagcacaagcttgcacagaagtggaggcgggaaataagcacaagtgtgccttcccagcc

SEQ ID NO: 6845 - DNA, 418 bp, Homo sapiens
aaaaatggagagtctgaattttattagagctcacacaccatatattaacatatacaactgtgaaccagctaatccctctgagaaaaactccccatctacccaatactgttacagcatacaatctctgttcttgggcattttgtcagtgatgctgatctttgccttcttccaggaacttgtaatagctggcatcgttgagaatgaatggaaaagaacgtgctccagacccaaatctaacatagttctcctgtcagcagaagaaaaaaaagaacagactattgaaataaaagaagaagtggttgggctaactgaaacatcttcccaaccaaagaatgaagaagacattgaaattattccaatccaagaagaggaagaagaagaaacagagacgaactttccagaacctccccaagatcag

SEQ ID NO: 6846 - DNA, 479 bp, Homo sapiens
  unsure (11): n=A,T,C or G
  unsure (17): n=A,T,C or G
  unsure (18): n=A,T,C or G
  unsure (198): n=A,T,C or G
  unsure (396): n=A,T,C or G
ccttgcctcanatccanngtcactcggaagaggccatgtctaccctcaatgacactcatggaggaaatgctgagagaagcattcagatgcatgacacaaggtaagactgccaaaaatcttgttcttgctctcctcattttgttatttgttttatttttaggagttttgagagcaaaatgacaacacccagaaattcantaaatgggactttcccggcagagccaatgaaaggccctattgctatacaatctggtccaaaaccactcttcaggaggatgtcttcactggtgggccccacgcaaagcttcttcatgagggaatctaagactttgggggctgtccagattatgaatgggctcttccacattgccctggggggtcttctgatgatcccancagggatctatgcacccatctgtgtgactgtgtggtaccctctctggggaggcattatgtatattatttccggatcactcctg

SEQ ID NO: 6847 - DNA, 486 bp, Homo sapiens
  unsure (348): n=A,T,C or G
  unsure (349): n=A,T,C or G
  unsure (406): n=A,T,C or G
ctgtgctggccccgacacagctccagttccacccatgacatctggctgaggaggcttatgggagcggcttctcatgcacagttactgtccctctctggagggtcctttaatggggactgtgcaaagcagtgacactaactgccagtacactcacttttctgaggtgaaaataaaaaggtttattcaaggataaatgaactctggttaaattactacttcattttcattactacttcatatattagatttcagagtgtgtgagatggacagtgtattctggaaattttaatttaacacccatccacaaatacttatttcaaggaaggctaatcatcttcattaaattgnncactttttcgtgtagactttttctctccatgtttactaaaacagggagatccacgangcacatttttttaacctcgcaaaactcttaattctaacttaattactaaactctgccttcaaccaaattttcaatatctt

SEQ ID NO: 6848 - DNA, 223 bp, Homo sapiens
ccactgactcaggtgaccttctaccgagatggctcagctctgggtccccccgggcctaacagggaattctccatcaccgtggtacaaaaggcagacagcgggcactaccactgcagtggcatcttccagagccctggtcctgggatcccagaaacagcatctgttgtggctatcacagtccaagaactgtttccagcgccaattctcagagctgtaccctcag

SEQ ID NO: 6849 - DNA, 249 bp, Homo sapiens
ccttcatgtgtatgtctggcaatcactttgacctacttagtaggtaacaaacatgatgccaccagctacagtgattatttaggcttatgtaacactataaatgaaaaggggagtagtagagcacccccattatctaaagcggggatcagcaaactttctctgtgaagagctagacagtaaaattttaggttttatgggccgcatagggtttgtgtctcatattattctgtgtcgttgtcataacccttt

SEQ ID NO: 6850 - DNA, 361 bp, Homo sapiens
aaaaacctgtacacagtgtttattgtggttaggaagcaatttcccaatgtacctataagaaatgtgcatcaagccagcctgaccaacatggtgaaaccccatctgtactaaacataaaaaaattagcctggcatggtggtgtacgcctgtaatcccagtgacttgggaggctgaggcaggagaatcgcttgaacccgggaggcggaggttgcagtgagctaagatcgcgccactgtactccagcctgggcaacagcgagactccatctcaaaaaaaaaggaaatgtgtatcaagaacatgattatccaggggtattttctaattcagatcatcaaactgattatatagaagagttggcttt

SEQ ID NO: 6851 - DNA, 494 bp, Homo sapiens
ctgcaagaggctgacagaggccaccaccagaaattccttgaggtgagtttcaatgttcttgttgtagagcgtgaagagggcagcagacacctggatgatggctttggtcaagcaatgaatattgttgttgtaaccatccttctcaatgctataaaaggaagaagggtcagtggcaaggagtgggagggaaactgccagaaagatcaagagcaggcaggccaccttatattcctcctcaggagatgaagtatcagctttcagattagcaatggcagccaccaaggctgggtcaatgtcacagcccacacctgcagcagatgccagctcaaagatactcaaggtcaccttgatgtctgtgtctggagtgacaaactccttcaagcactcaatgggacccataagaaatgggcagtgggaggagaaaacctcccgaagtccctcttgggccatggccctgaaactgaggataaccccaatgatggtcatgcgcttta

SEQ ID NO: 6852 - DNA, 189 bp, Homo sapiens
ctgcttgagaacagagactgctaccccatcctgcccatgcaggcaggctcttgccagccccgttctgacccgtgtccccccaggctctgcctgggcagaagactcaccttggaggagtgggccctggagtcctgtccctcccagaagcccccagggtgggatttctcaggctgccagggcaggcccagg

SEQ ID NO: 6853 - DNA, 295 bp, Homo sapiens
aaacagaggaaccgaaaaatgaggtttacagtctcatcacatgaacactcaaatctgtacccaaggaaacagcggtattatatttactgtcacagctagaccctatcaggtgaacagggctctccacctgcggctgttgcttcgcaaaatatctttcctctccacgtgaacaagtagctctagagtgcttttaggcagagtgacggtgatgtcatgggcaccacgccaatcttattcctggacaatgacttaagccccatcgtgagaatggttttttcctcttcaacacattttt

SEQ ID NO: 6854 - DNA, 186 bp, Homo sapiens
aaaaacttaaatatttcggaggcacatgttggactactttgttttaattaaactgctagtatttctttgtcaaggatgtttctagttttttgctttattgccttgcattctaatgcagtttgttctgtaactcgagagccagtagcattggattgatggaagtgtagggtttatgaattattgcag

SEQ ID NO: 6855 - DNA, 357 bp, Homo sapiens; identical to SEQ ID NO: 87
  unsure (230): n=A,T,C or G
  unsure (292): n=A,T,C or G

SEQ ID NO: 6856 - DNA, 308 bp, Homo sapiens; identical to SEQ ID NO: 88

SEQ ID NO: 6857 - DNA, 326 bp, Homo sapiens
cctgaggctgctggaggttgctacatgggtgatgaccccatctctgctatcttccccctgcccgttgtgtaccatcttgctcttgggaaagtggcattcacacccccttcctggctgggttagtctcatttgaatacttccacgtgctcccaccctcggcattcaacttcccacacaggtgggggctgtctggatgcacagggtgattcctccagaccttcctttgattgggtctttgtctgttgattgacactttgtgacaggtcacctttccattgcaatgtctagttgtgaggctacctcatgactcaatttccagtgggttt

SEQ ID NO: 6858 - DNA, 495 bp, Homo sapiens
cctcttggcctcacatacagttggtatatgaattcttcttgagatttttggagagccctgatttccagcctagcattgcaaaacgatacattgatcagaaattcgtacaacagctcctggagctttttgatagtgaagatcccagagaacgtgacttcctgaagactgttctgcaccgaatttatgggaaatttcttggattaagagcattcatcagaaaacaaattaacaacattttcctcaggtttatatatgaaacagaacatttcaatggtgttgctgaacttcttgaaatattaggaagtattatcaatggctttgcattgccactgaaagcagaacataaacaatttctaatgaaggttcttattcctatgcatactgcaaaaggattagctttgtttcatgctcagctagcatattgtgttgtacagttcctggagaaagatacaacactaacagagccagtgatcagaggactgctgaaatttttgg

SEQ ID NO: 6859 - DNA, 418 bp, Homo sapiens
ctgggccttcaggaaggtggtccacttcttctgcagcagcttttcgccgcccacgtcattcttgcagactctagccacccgcgatgtgtggagcctctcaaagaagtcaaactcgctggctgtctcctcgaagaagaagtagacgacctgggtcgaagggatggctgccacaaaggaggcgtcatgatgcagccagcggaggaagttgtcggtcttgaggacaagctgggatcccagtgtgcgcatcaggatgggctcactgcccaggaagttgttcatagtaccagaatagagcatcccatccaccaagacagccgtatgcttgtgagcggggtcaaaggggctttggccttttccctccatgaccttgtcctccgagatgggcaacaggtaggaatcttgaagttcctaaatgggg

SEQ ID NO: 6860 - DNA, 269 bp, Homo sapiens
caggctccaaactccactaaccagagctgtgattgtgcccgctgagtggactgcgttgtcagggagtgagtgctccatcatcgggagaatccaagcaggaccgccatggaggaaggtcaatattcagggatcgaggagcttcccaggaggcggtgttgcaggcgtgggactcagatcgtgctgctggggctggtgaccgccgctctgtgggctgggctgctgactctgcttctcctgtggcactgggacaccacacagagtctaaaaca

SEQ ID NO: 6861 - DNA, 192 bp, Homo sapiens
cctaccaccttcagaagtcgacctgtggcaaatgtggctaccctgccaagcgcaagagaaagtataactggagtgccaaggctaaaagacgaaataccaccggaactggtcgaatgaggcacctaaaaattgtataccgcagattcaggcatggattccgtgaaggaacaacacctaaacccaagagggcag

SEQ ID NO: 6862 - DNA, 206 bp, Homo sapiens; identical to SEQ ID NO: 89
  unsure (142): n=A,T,C or G
  unsure (143): n=A,T,C or G

SEQ ID NO: 6863 - DNA, 417 bp, Homo sapiens
aaacagagaacaaagggattcactcagagatcagaatacgaagcttcctctcagcatcatgggaggagataaaataattcattctatggtctttgttccattaagacttggtgctttcttcagtaacagtatgtgaaatgtggctgactttgagtcccccactgtgtaagtggaattatttttcactgcagcatttctgagtctttttcttgttccttactctgaactgtaaaattaagttcataaaggcatttggcaagggtggaggaagcttccatgttactaatggctagcactgataagttattttcatgtctctttaacaatctttctaaatatggaaggctgcacagcaaaattctttttcaatcttcattcatgtttctagaaaatttagaaaatggtgtcagaaaacag

SEQ ID NO: 6864 - DNA, 336 bp, Homo sapiens
ctggcaggtagaattcagggacactgctaaacatcctacagtgcacacccacaacaaagaattaattggtccaaaatcaccatagtgccacatttcacaaactctgagccaagtcatccttttccatcacagtgtgtcagcggataatatcgaaaatgtaaatatcaagtagcaaaaataggtgttcagagattgagtgatagatataaaattaaatagctgaaggctcagagtgagaagtaaggctgggttggtggggtttcatcatgacaatccttgtggaactctttgtttctgtaaactctgtgtatgtgtatgtacaacttttgatatttt

SEQ ID NO: 6865 - DNA, 373 bp, Homo sapiens; identical to SEQ ID NO: 90

SEQ ID NO: 6866 - DNA, 545 bp, Homo sapiens; identical to SEQ ID NO: 307

SEQ ID NO: 6867 - DNA, 428 bp, Homo sapiens
ctgatgaagaacacgggtgtgatccttgccaatgacgccaatgctgagcggctcaagagtgttgtgggcaacttgcatcggctgggagtcaccaacaccattatcagccactatgatgggcgccagttccccaaggtggtggggggctttgaccgagtactgctggatgctccctgcagtggcactggggtcatctccaaggatccagccgtgaagactaacaaggatgagaaggacatcctgcgctgtgctcacctccagaaggagttgctcctgagtgctattgactctgtcaatgcgacctccaagacaggaggctacctggtttactgcacctgttctatcacagtagaagagaatgagtgggtggtagactatgctctgaaaaagaggaatgtgcgactggtgcccacgggcctagactttgg

SEQ ID NO: 6868 - DNA, 347 bp, Homo sapiens; identical to SEQ ID NO: 91

SEQ ID NO: 6869 - DNA, 308 bp, Homo sapiens; identical to SEQ ID NO: 3350

SEQ ID NO: 6870 - DNA, 299 bp, Homo sapiens
cctctatgccagagaaggagccctcagttctgagaaaagtactattggaggatgaggtgttggctgccatggtgtctgtcattggcactgctacaacccacctgagccctgagttagctgcccagagtgtgacacacattgtgcccctcttcttggatggcaacgtgtcctttctgcctgaaaacagcttcccgagcagattccagccattccaggatggctcctcagggcagaggcggctgattgcactgcttatggcctttgtctgctccctgcctcgaaatgtggaaatccctcag

SEQ ID NO: 6871 - DNA, 421 bp, Homo sapiens; identical to SEQ ID NO: 92

SEQ ID NO: 6872 - DNA, 406 bp, Homo sapiens
ccagcagaaatggtctataaatctacacatttgtcctaaaacctaaagccatgtagaccttttatacagtaagatacccacttacgtgcagtgaggtgtattcctataggtgacatcaaagtcatgcaacaagacactggcgtgaagaagtaatttctgagagtcagacagaacaataatatgaactacatagaactggataataccaatcaaaaagcgaaaatgcgaaacagctttcctgggacaagagtcaggtaattttgttcataggtaatacaaatgcacttacacacacctctaaaaacatactttcttggccgggcgcagtggctcatgcctgtaatcccagcactctgggaggccgaggcagacggatcatgagatcaggagttcgagaccagcctgg

SEQ ID NO: 6873 - DNA, 589 bp, Homo sapiens
ctgctgtttacttatcaaggttatagttcgtgcttctaactggagcactagctgctaatgcatatctagagaaaaaaatcttcctttgcagttagtgccaaaaggattcaaggcttgtctggctgcaaaatgagatttttatcaggcatcttgagcattattataaagcagatgacagtatcgtgtttggggtagtgaaattaaagcccataccaaagtgggccagccaagagcaggtgtcagcctgggacagatgtgaacaccaggaataaaagagcagttatgtaatccatttcgacgcacttctggaactgtaaactgtaaacaaatgctgcaaaggttaactattttctaaaacttacttttttccagtgggaaaacaaatatttggtatggtaacccaaacttatcactgcttttttgctcagtttcacacgttgtaactcaaattactctaaacgtgtttaactgccaaacagctacctgcatgttagaaaccagacaatacaaaccacctaataagaaaggttccctaatagaaatactaatacaaaaaaatgccttagctggagcaacttaaaaatcaaat

SEQ ID NO: 6874 - DNA, 470 bp, Homo sapiens
ccttggagactcacgagttttgagagcaaaatgacaacacccagaaattcagtaaatgggactttcccggcagagccaatgaaaggccctattgctatgcaatctggtccaaaaccactcttcaggaggatgtcttcactggtgggccccacgcaaagcttcttcatgagggaatctaagactttgggggctgtccagattatgaatgggctcttccacattgccctggggggtcttctgatgatcccagcagggatctatgcacccatctgtgtgactgtgtggtaccctctctggggaggcattatgtatattatttccggatcactcctggcagcaacggagaaaaactccaggaagtgtttggtcaaaggaaaaatgataatgaattcattgagcctctttgctgccatttctggaatgattctttcaatcatggacatacttaatattaaaatttcccatttttt

SEQ ID NO: 6875 - DNA, 324 bp, Homo sapiens; identical to SEQ ID NO: 93
  unsure (16): n=A,T,C or G
  unsure (182): n=A,T,C or G
  unsure (183): n=A,T,C or G
  unsure (185): n=A,T,C or G
  unsure (193): n=A,T,C or G
  unsure (209): n=A,T,C or G
  unsure (280): n=A,T,C or G
  unsure (285): n=A,T,C or G
  unsure (288): n=A,T,C or G
  unsure (294): n=A,T,C or G
  unsure (308): n=A,T,C or G

SEQ ID NO: 6876 - DNA, 366 bp, Homo sapiens
ctggaagaagaaaagaaagcaaacaatgagaaacagaaagctgaaagggagctagagggtcaaatccagagattgaacatagagaaaaagaaactaaatacggacctgtatcacatgaaacattctctcagatactttgaagaagagtccaaggatctggccggccgcctgcaacgttcatcgcagcgtataggagagttagagtggtctctctgtgctgtcgccgccacacagaagaagaagccggatgggttctcgagccgcagtaaagcacttctcaagcggcagttagagcagtccatacgggagcagatactgctgaaaggacacgtgacacagttgaaggagtcgcttaaagaagtccag

SEQ ID NO: 6877 - DNA, 600 bp, Homo sapiens
  unsure (11): n=A,T,C or G
  unsure (563): n=A,T,C or G
ccttgcctcanatccaaggtcactcggaagaggccatgtctaccctcaatgacactcatggaggaaatgctgagagaagcattcagatgcatgacacaaggtaagactgccaaaaatcttgttcttgctctcctcattttgttatttgttttatttttaggagttttgagagcaaaatgacaacacccagaaattcagtaaatgggactttcccggcagagccaatgaaaggccctattgctatgcaatctggtccaaaaccactcttcaggaggatgtcttcactggtgggccccacgcaaagcttcttcatgagggaatctaagactttgggggctgtccagattatgaatgggctcttccacattgccctggggggtcttctgatgatcccagcagggatctatgcacccatctgtgtgactgtgtggtaccctctctggggaggcattatgtatattatttccggatcactcctggcagcaacggagaaaaactccaggaagtgtttggtcaaaggaaaaatgataatgaattcattgagcctcttgctgccatttctngaatgattcttttcaatcatggacatacttaatatta

SEQ ID NO: 6878 - DNA, 605 bp, Homo sapiens
gtcattgttttcaacagtgacttttatttacttaaagccagcagtagttcccattactctcataatgttatagttaaggcttgatttagttccagaaaataaatagggtaaatttttaatatttccctagctctgtctgctatagggaatttcagagtatgaaggtaagatgaagcagatatataagaacatttttagataatgacaatttttccttaaaatttggtgagaatttagtttcttctcaagattctgtacttctatccataaaagtaaatttctattttagtagctctgtaagaactaggccagagaagagtattacccataatagtaaatagcaaatactttggcaagtctgaattagagtacaagtgaagacattcacaaacacactttttacatctcctggatgtggtacgggctgtatgttagaattaaagcatcacaactatctgattgtagggtgctggtgggcaatgcaatcaatcaacacgtctaccccaacagatgtggagacgcatggaaaaaatacatcaaccaaagtggtcagggagaacaaaacacagaaaacaccataaaactgaagacattatctcttcttg

SEQ ID NO: 6879 - DNA, 227 bp, Homo sapiens
aaagtttaacttcctggttctcttcacccccttgcctctagtttcagtaaacaactttcccgccagtcctaatcactagttcacatctgttaccctggtcacctgctccatcctgactcatctcggtcacctgctttgaccggagtcacctttagttacctcttcctaaccgtccttcccaccaaactgctcaccccgccactctggctcgtactcctgctctcttt

SEQ ID NO: 6880 - DNA, 322 bp, Homo sapiens
aaagttgctgagctgcactatcttatattttagttgcttaggaaatgatttataatcccaacaagataatctccttgagaataagccttatgtctcattcattttggtgaaccccataacaaatacagtgcctgttaatagatgccaataaatgtttgagcaaagagtgaatttcagaaggactatgctctacctgagaatccatcacatttagtacaatcacccattttggaaaacagttcatactcccttttaagggtgtcattctgattaactcagttgctgacctactcatttcaacaatagaaaacactaggaattt

SEQ ID NO: 6881 - DNA, 403 bp, Homo sapiens
aaaatctcttaggccaaattaccttattgaggaggaagggagaactgaatttgaatcaactaaaataagattgatatctttcctcattggaaaaaaacatgaaaacacagggactcgtaagaatgctaacatttgtatgttgtttccatttctactccaggtgttgccacatctgcaaacttcctgggagagtaatggggattcgagtgcttcgattatctttggtggtcatcctcgtattattactggtagctggtgctttgactgccttacttcccagtgttaaagaagacaagatgctcatgttgcgtagggaaataaaatcccagggcaagtccaccatggactcctttactctcataatgcagacgtacaacagaacagatctcttattgaaactttt

SEQ ID NO: 6882 - DNA, 508 bp, Homo sapiens
  unsure (304): n=A,T,C or G
  unsure (406): n=A,T,C or G
  unsure (412): n=A,T,C or G
  unsure (419): n=A,T,C or G
  unsure (433): n=A,T,C or G
  unsure (439): n=A,T,C or G
  unsure (475): n=A,T,C or G
  unsure (492): n=A,T,C or G
ctgaacaatatagaaaagtgcagaggcaagtgcctttccagaaccgcgtggtgacttagaagcggggcttgcgcttgcggccggtgtactgggtgtcaggtctgacttccctgccctggcgcctgtgccgctccttcttctccagcacccatgcccgactcttcctcaccattccccgcctcgacatccttaatgggaacctgtggcggagacacagctatgagctgatggacagacctgcccgggcggccgcccgggcaggtgtacaagcttttttttttttttttttttttttttttaccanagttgacttttaatttgtcctaaagccgctgaagcaaaaaccatgataaaacattctgctttcttttcttttacaaccccacgaacgcaaaaaaaaaaaaancaaaancaaaacnaaaaaaagaaacancatacnaaacccaaactatttgtaggaaaaaatggttttgtncatgggatgaaacaatntaaattcaaaacttac

SEQ ID NO: 6883 - DNA, 214 bp, Homo sapiens
  unsure (16): n=A,T,C or G
aaaaacaaaaaattanttgggtatggtggtgtgcacctgtagtcctagctactcaggaggctgaagtgggaggatcacttattatttagaaaaaaagaaaactaggtatggacatgtgaaggaacatacttggtgtggtggtaaatatcaaaattgagatccagagtgatgccagttggaggtcgaggaggaaaatgatttcatcaaggtgtgg

SEQ ID NO: 6884 - DNA, 354 bp, Homo sapiens
ctgtccctggatagtgccacctttgcctctccccaggattttgggcttgttttgcaaacactcaaagagtacaacctagccctgaaaagactgagcttccatgacatgaatctcgctgactgtcagagcgaggtgctccttttgctacagaatctgactctgcaagagattaccttctccttctgccgtctgtttgagaagcgcccagcccaatttctgcctgagatggttgctgctatgaagggcaactccacactgaagggcctccggctgccagggaaccgcctggggaatgctggcctgctggccttggcagatgttttctcagaggattcatcctcctctctctgtcag

SEQ ID NO: 6885 - DNA, 150 bp, Homo sapiens; identical to SEQ ID NO: 94
  unsure (16): n=A,T,C or G
  unsure (17): n=A,T,C or G
  unsure (31): n=A,T,C or G
  unsure (82): n=A,T,C or G
  unsure (91): n=A,T,C or G
  unsure (92): n=A,T,C or G
  unsure (107): n=A,T,C or G
  unsure (108): n=A,T,C or G

SEQ ID NO: 6886 - DNA, 167 bp, Homo sapiens; identical to SEQ ID NO: 95
  unsure (14): n=A,T,C or G
  unsure (70): n=A,T,C or G
  unsure (95): n=A,T,C or G
  unsure (107): n=A,T,C or G
  unsure (121): n=A,T,C or G
  unsure (122): n=A,T,C or G
  unsure (149): n=A,T,C or G
  unsure (156): n=A,T,C or G

SEQ ID NO: 6887 - DNA, 442 bp, Homo sapiens
ccttcttcactgaagagtatgtcagggaccaccctgaggaccaggacaagctgacccacctcaaggacctgattgcatggcagatccccttcttgggagctgggattaagatccatgagaaaagggtgtcagataacttgcgacccttccatgaccggatggaggaatgtttcgagaacctgaaaatgaaggtggagaaggagtacggtgtccgagagatgcctgactttgacgacaggagggtgggccgccccaggtctatgctgcgctcatacagacagatgtccatcatctctctggcttccatgaattctgactgcagcacccccagcaagcctacctcagagagctttgacctggaaattagcatcacccaagacgccgagagtggagcaggaggaaccgatctccccggggagcaccctgcctgaggtcaagctgc

SEQ ID NO: 6888 - DNA, 442 bp, Homo sapiens
  unsure (314): n=A,T,C or G
ctgtgcagcgccgtggagcacatgcattcacgccgggtgatgcaccgagacatcaagcctgccaacgtgttcatcacagccacgggcgtcgtgaagctcggtgaccttggtctgggccgcttcttcagctctgagaccaccgcagcccactccctagtggggacgccctactacatgtcaccggagaggatccatgagaacggctacaacttcaagtccgacatctggtccttgggctgtctgctgtacgagatggcagccctccagagccccttctatggagataagatgaatctcttctccctgtgccagangatcgagcagtgtgactaccccccactccccggggagcactactccgagaagttacgagaactggtcagcatgtgcatctgccctgacccccaccagagacctgacatcggatacgtgcaccaggtgg

SEQ ID NO: 6889 - DNA, 395 bp, Homo sapiens
aaatgaagaagatagcatttctaacctgaaattagggacattaaatggatctcaggaagaaatgtggcaaaaaacggaaactgtaaaacaagaaaatgctgcagttcagaagatggttgaaaatttccagaagaaccaactccacattcaaccaggttgtgttgaagaggttgtttatgagtcgcaccaaccggccgcctctgtccctttcccggatgatccggaagatgaagcttcctggccgggaaaacaagacggccgtggttgtggggaccataactgatgatgtgcgggttcaggaggtacccaaactgaaggtatgtgcactgcgcgtgaccagccgggcccgcagccgcatcctcagggcagggggcaagatcctcactttcgaccag

SEQ ID NO: 6890 - DNA, 307 bp, Homo sapiens; identical to SEQ ID NO: 96
  unsure (17): n=A,T,C or G
  unsure (135): n=A,T,C or G
  unsure (211): n=A,T,C or G
  unsure (216): n=A,T,C or G
  unsure (222): n=A,T,C or G
  unsure (237): n=A,T,C or G
  unsure (244): n=A,T,C or G
  unsure (260): n=A,T,C or G
  unsure (272): n=A,T,C or G
  unsure (288): n=A,T,C or G

SEQ ID NO: 6891 - DNA, 337 bp, Homo sapiens; identical to SEQ ID NO: 98
  unsure (17): n=A,T,C or G
  unsure (308): n=A,T,C or G
  unsure (320): n=A,T,C or G

SEQ ID NO: 6892 - DNA, 342 bp, Homo sapiens; identical to SEQ ID NO: 99
  unsure (96): n=A,T,C or G
  unsure (97): n=A,T,C or G
  unsure (112): n=A,T,C or G
  unsure (113): n=A,T,C or G
  unsure (128): n=A,T,C or G
  unsure (129): n=A,T,C or G
  unsure (139): n=A,T,C or G
  unsure (143): n=A,T,C or G
  unsure (151): n=A,T,C or G
  unsure (154): n=A,T,C or G
  unsure (155): n=A,T,C or G
  unsure (209): n=A,T,C or G
  unsure (250): n=A,T,C or G
  unsure (257): n=A,T,C or G
  unsure (272): n=A,T,C or G
  unsure (279): n=A,T,C or G
  unsure (285): n=A,T,C or G
  unsure (289): n=A,T,C or G
  unsure (320): n=A,T,C or G
  unsure (324): n=A,T,C or G

SEQ ID NO: 6893 - DNA, 366 bp, Homo sapiens; identical to SEQ ID NO: 100
  unsure (292): n=A,T,C or G
  unsure (332): n=A,T,C or G
  unsure (336): n=A,T,C or G
  unsure (352): n=A,T,C or G

SEQ ID NO: 6894 - DNA, 285 bp, Homo sapiens; identical to SEQ ID NO: 321

SEQ ID NO: 6895 - DNA, 260 bp, Homo sapiens; identical to SEQ ID NO: 548
  unsure (14): n=A,T,C or G
  unsure (247): n=A,T,C or G

SEQ ID NO: 6896 - DNA, 293 bp, Homo sapiens
  unsure (242): n=A,T,C or G
  unsure (243): n=A,T,C or G
  unsure (262): n=A,T,C or G
ttcaaagcaggcttgggtctccccacacactgcctgccaggacagtcctacaggatgagcaggggacccacagttcacggaggaggctctaggtcctggaagaataaagtgggtgatggaggggggtatagggatggaaatgagggatccaggggtcaaggccagattctaaactcagactccagagatcagagaagaaggaacacagcctgccctgggtatatggagaaattgaggctgtnnaggagaggggctgggccangacacctgtgaaaaggtgacttgggagggct

SEQ ID NO: 6897 - DNA, 305 bp, Homo sapiens
ctgcaggacatgtagagaaaccaaaccgggaaatcttacaaggagttgaaaagattaatgtcccaacctgatgagattacggccttgagacaataaggtggagcaacagaacaatgggaaagaggactgggagaggaatctaagaaccagatggcttcagctctctagaggagctgagcctattcacagtgcctaacctggaagcctgtgaggaacaggcctcaggcccttgccatgacctacttaggctacaatttcctttaaggcagcccctagctctgggaaggaatactggtagccagtgg

SEQ ID NO: 6898 - DNA, 571 bp, Homo sapiens; identical to SEQ ID NO: 97
  unsure (349): n=A,T,C or G
  unsure (470): n=A,T,C or G
  unsure (537): n=A,T,C or G

SEQ ID NO: 6899 - DNA, 131 bp, Homo sapiens; identical to SEQ ID NO: 101
  unsure (17): n=A,T,C or G
  unsure (31): n=A,T,C or G
  unsure (92): n=A,T,C or G

SEQ ID NO: 6900 - DNA, 330 bp, Homo sapiens; identical to SEQ ID NO: 102
  unsure (16): n=A,T,C or G
  unsure (36): n=A,T,C or G
  unsure (227): n=A,T,C or G
  unsure (244): n=A,T,C or G
  unsure (245): n=A,T,C or G
  unsure (250): n=A,T,C or G
  unsure (260): n=A,T,C or G

SEQ ID NO: 6901 - DNA, 192 bp, Homo sapiens
tctgaacacagaatctgaggagcacactgttcaaacagttgggacagacaggtccctgcaaaggctactgcctttttaaaacacatggggtggggatcatggacggcatggaaaggggagagaaggtgaggaaacaggcggcggggagagaatgagaagaggaacaggtatgcgctggggaagatggggcag

SEQ ID NO: 6902 - DNA, 369 bp, Homo sapiens; identical to SEQ ID NO: 103
  unsure (30): n=A,T,C or G
  unsure (38): n=A,T,C or G
  unsure (71): n=A,T,C or G
  unsure (72): n=A,T,C or G
  unsure (91): n=A,T,C or G
  unsure (92): n=A,T,C or G
  unsure (176): n=A,T,C or G
  unsure (205): n=A,T,C or G

SEQ ID NO: 6903 - DNA, 459 bp, Homo sapiens
  unsure (31): n=A,T,C or G
  unsure (35): n=A,T,C or G
  unsure (263): n=A,T,C or G
  unsure (311): n=A,T,C or G
aagctttttttttttttttttttttttttgnttgnacacagatgctttattttggatgttaatatgtcaacattgtatgcaagattctcttacaatgaagttttccatatatcacaaaactcaatttagtcagggtaattgctgtattaatgtgaaaaccttacaataaaatgcagtattatgtatgtgtagtcagtttccatgcaagtatggctgctacatgttatgtctggcatttgtataacatactggaagaaactcanaggaacaaaacagtataaaggtgacttaagatgcctgacatgtttaanataaaaaatcttgcaaaaagcaacaaagcagctaactgaaggattcaaccagtaccaacccaaatatgtattatgtccaataagcccagacttatccacaatatattaccatttaggataatttaatgctcaagaaaaaatatgcttt

SEQ ID NO: 6904 - DNA, 454 bp, Homo sapiens
gtttcttacccggtctgagtacgacaggggcgtgaatactttttctcccgaaggaagattatttcaagtggaatatgccattgaggctatcaagcttggttctacagccattgggatccagacatcagagggtgtgtgcctagctgtggagaagagaattacttccccactgatggagcccagcagcattgagaaaattgtagagattgatgctcacataggttgtgccatgagtgggctaattgctgatgctaagactttaattgataaagccagagtggagacacagaaccactggttcacctacaatgagacaatgacagtggagagtgtgacccaagctgtgtccaatctggctttgcagtttggagaagaagatgcggatccaggtgccatgtctcgtccctttggagtagcattattatttggaggagttgatgagaaaggaccccag

SEQ ID NO: 6905 - DNA, 479 bp, Homo sapiens
aaactgataagaaacaatgaataggaaaggaaacctgctaaaatctcttagaatttacacgattcttattctactacaagaaagcattatttggtacaaggtgtatttgtggatgtacatgaacagtatatatattatccggatcatgttgtgctatgtacaggtctttacaattcttcctgaaggttaaaacagttcattagaattcaaaatgcgtaatcatctgtaagttggcacttgttaggctcttgtcagcattgataactggcatgttttattgcagcccagttccagccagtgtttgccaacttgtacaacagaagtccagcaataggtgggtagagtgcaggaaaaacagtgccatgtttctcaattggagaccctgaaataagtgaagttactagctgctaaataaatgtcactcaaaagcagtctcttggctttttcttacacagcgggcaacttttcttttacctcgg

SEQ ID NO: 6906 - DNA, 305 bp, Homo sapiens
cctatccccttgccgatgcccacctcaccaagaagctactggacctcgttcagcagtcatgtaactataagcagcttcggaaaggagccaatgaggccaccaaaaccctcaacaggggcatctctgagttcatcgtgatggctgcagacgccgagccactggagatcattctgcacctgccgctgctgtgtgaagacaagaatgtgccctacgtgtttgtgcgctccaagcaggccctggggagagcctgtggggtctccaggcctgtcatcgcctgttctgtcaccatcaaagaaggctcgcag

SEQ ID NO: 6907 - DNA, 135 bp, Homo sapiens; identical to SEQ ID NO: 322

SEQ ID NO: 6908 - DNA, 487 bp, Homo sapiens
ctgttcctggggctgctcccacagactatgagactcagcagcccccaggcccaccccagcagcctgtgatgaccccaaacttcacctggtagccatggagttctctgcacccctcattcactcccctctggtcatttcctgagtctaacatgccctttgaggaaggcaggaggccgatccgtgaacagagagacactgggccccagaggtgacggggctccagggacagacacatctctgccctaagagactgtctcctttctggtgactgtcctgggagggttggattctggcacctcacccagtctcacccgtccctctgtgtccccatgtcctcatgacccagcacaggccacagagctgcagcctagacccagagccctctctgtgccctccattggtctccccttggggtgacctctgtgtcaccaggccgtgtggccctcccaggctggattggcatccagtcctcagcctagaccctcag

SEQ ID NO: 6909 - DNA, 299 bp, Homo sapiens
  unsure (123): n=A,T,C or G
  unsure (194): n=A,T,C or G
  unsure (198): n=A,T,C or G
  unsure (199): n=A,T,C or G
  unsure (264): n=A,T,C or G
  unsure (275): n=A,T,C or G
  unsure (291): n=A,T,C or G
ccttttttaagtgacctgtaactcatatcagtgaaaaagaacatgctataaaaagattccacaaagtgagagcattaagctcaaaggtcctgaggtaggtgtgtttgaggagctggtgtgtancggctgtataagaagtcaacctccttattttcaggtacatttattattattttaaccccaagcagaattgnctanntgggtccctcacctttacacaatagtcataggatttgactgttatcaaaaagtaaatccactctnagaggccatanatttcctattactgangttcttca

SEQ ID NO: 6910 - DNA, 254 bp, Homo sapiens; identical to SEQ ID NO: 104
  unsure (84): n=A,T,C or G
  unsure (90): n=A,T,C or G
  unsure (92): n=A,T,C or G

SEQ ID NO: 6911 - DNA, 373 bp, Homo sapiens; identical to SEQ ID NO: 107

SEQ ID NO: 6912 - DNA, 75 bp, Homo sapiens; identical to SEQ ID NO: 108
  unsure (44): n=A,T,C or G
  unsure (48): n=A,T,C or G

SEQ ID NO: 6913 - DNA, 485 bp, Homo sapiens; identical to SEQ ID NO: 109
  unsure (475): n=A,T,C or G

SEQ ID NO: 6914 - DNA, 265 bp, Homo sapiens
cctttgtgggatttacttgttgtccagcaagaaactgtaggagcttcctaatatctatgtgcacttcagccatgtgttccacgtttctgtcctcatgggtgctttcagaggctaatggaggatttccaagatctttaaactgaactcaaagaatgcaaaagcggcaagttcagacaaggcaagaacaggacctttagtccattttaagccataaatattacacaaaatatgcctctaactgaaactgagaggtataaaaacatat

SEQ ID NO: 6915 - DNA, 337 bp, Homo sapiens
cctggcaaggaacatggtgcatggtaggtggcagaagggacctctgtgctcagagctgtgcctcaggacccatcgttcagatgggaagactgaggttggggagatgtgtcttgggttaggaagctgggctcggggcaggggtcagcgcgggcatggcaggcacggtgaatgtgaacttctcagtctggacaaaggcaacgcccttctcatagtaggcagcctcgttaatgaacacggggtacaccgtggactctccctcatagagcaggtcctccccactgaacatctggaagatgggagcaccaggctgcagtggctggaagtctcggtcctgcag

SEQ ID NO: 6916 - DNA, 399 bp, Homo sapiens
tcagaatataaccctcatgcctggacccctgagagcttctgatcccagctattagggacagaagaagcctccaaatctggaaggtgctgaatgccctgctgactgggaaagtttcagggcactgatggggtctacctggtaagcggagggcctgaggaaacctgtagcttcaatcatgtctggtaaccgggtgcctgagccccaatctgggttgtgaggaaataggggagaggtatcctgggccacatcccagcctaacacctgtgaggttcattttaggaactaacctcattagctataaggatcatgcagaggcagcaaagccgggtgcgatgagctcagcctttactcattcacatacaccatcacactttaattccaatctgtatattgcttttt

SEQ ID NO: 6917 - DNA, 561 bp, Homo sapiens; identical to SEQ ID NO: 110
  unsure (456): n=A,T,C or G
  unsure (471): n=A,T,C or G

SEQ ID NO: 6918 - DNA, 340 bp, Homo sapiens
ccaacatggcaaaaccccgtctctactaaaaatacaaaaattagccagcgtggtggtgcatgcctgtaatcctagctactcgagaggctgaggcaggagaatcgcttgaacctgggaggcagagtttgcagtgagccgagatcgtgccattgtagtccagcctgggcgacagagtgagtgagacttcgtctcaaaaaaatagaaaaaatacatataaaataaaaataaatcaggaatgcaagatccaagtaactggactcccagtccagtgttcttggtcgagttgctctttgagctgttcaatcaaccaataattactgggagccaactatgtgttagg

SEQ ID NO: 6919 - DNA, 366 bp, Homo sapiens; identical to SEQ ID NO: 105
  unsure (146): n=A,T,C or G
  unsure (158): n=A,T,C or G
  unsure (352): n=A,T,C or G
  unsure (363): n=A,T,C or G

SEQ ID NO: 6920 - DNA, 485 bp, Homo sapiens; identical to SEQ ID NO: 106
  unsure (475): n=A,T,C or G

SEQ ID NO: 6921 - DNA, 255 bp, Homo sapiens; identical to SEQ ID NO: 111
  unsure (223): n=A,T,C or G
  unsure (249): n=A,T,C or G

SEQ ID NO: 6922 - DNA, 120 bp, Homo sapiens
ctggtgggagggagcatggatttggaggtggagaagtcactcctggtcctcggagggggtgggctgtgtgcctagttcagtgtgactcggggattggtgagggcggacaggtttctgagg

SEQ ID NO: 6923 - DNA, 433 bp, Homo sapiens
cctagagagtcacatgtctcagttcagaaatctatcgaagtggcagagctggaattcaaacacaagcagccgttctctgctattccaccctggtgtccaagcaacatggtagggcagaaggaagaggatcttacaaagagtaagggaaagggagaggggcagaggctgcttctcagagccaccaaaggacaaaataagacaggtgtgagcccagtggaggaggcacggggcagagaccagccactgttgctggcacgctggtgcacgtagcactgtggcagatggacctggagaggaagcaggagggacagcacaatggagccaagaaaggacttagcatggccgggcgcggtggttcatgcctgtaatcccagcattttgggaggccaaggtgggcagatcacctgaggtcaggagtttgagaccagcctgg

SEQ ID NO: 6924 - DNA, 98 bp, Homo sapiens
ctgatgatcgggaagaggatggctgctcccaggccgttccattggtgccactcacagaggaaaatgaggaagccatggaaaacgaacagtttcagcag

SEQ ID NO: 6925 - DNA, 365 bp, Homo sapiens; identical to SEQ ID NO: 112
  unsure (31): n=A,T,C or G
  unsure (38): n=A,T,C or G
  unsure (222): n=A,T,C or G
  unsure (229): n=A,T,C or G
  unsure (237): n=A,T,C or G
  unsure (250): n=A,T,C or G
  unsure (341): n=A,T,C or G

SEQ ID NO: 6926 - DNA, 517 bp, Homo sapiens
  unsure (14): n=A,T,C or G
  unsure (408): n=A,T,C or G
  unsure (479): n=A,T,C or G
  unsure (504): n=A,T,C or G
cctggagaacatangtgagttgctcaagacccagcacaagcatccatgattcctgtaataaggcttccctctgctgttttcactgcagccttaccaagtatggttgggtgtgcaaagtttacattttaaggacctctgctgctgccactgtcattgtggttaatgatggctttaaggtttattcttattcccgtatctttgagagaggaagagagtgggattgctacccacattttaatgaaggtggagctgagccgtagaactctctgggagccatccaacctggctgtggctcataacaaggcccagagcaggggctgttgccgaaaggctgtggagcaacaagttgacatctgacctgacatttgcctatgaacgtttgtcacacttccgctgtgagttgctgangcgaggtgtccaggcccaacccctcaatgtaggcttctgtgagcaggagtttgaacagacctgagccccangcaccgaggagggtgctggctgtangtgaatggtagtg

SEQ ID NO: 6927 - DNA, 525 bp, Homo sapiens
ctgacccctttcccgcgcactgaaagggcagagggtgaggcagtctggcccttggacccttcggccagaaattctcccttgcctccttgattgaggtgtcccagatgtagtattcccacaggggtctggcaggcccctcctgtaaccactccagtcacattttctgctcttgaggcagaggtgacatcaggacgtttacagcctccacatgaattgagtgttcatttacctcagtattaccgtgttcatttttgtcctcgtgctacagttagctccctgccgcctcttgcaggtcttacttcagctcttgcctgtgacccacacagcttctgggctctgcctctgctctaagaagtgctgtgggggtagagaaccaggaaggacatgctgttgggaatgtacacctgggcagaggtggccctgttaagatgtgactgtagccacagccagggatgggatccctgggtctctggaatctgaaacctcaacaaataccagtcttgacccctagcagcagagataaga

SEQ ID NO: 6928 - DNA, 341 bp, Homo sapiens
cgcagggtgatgtgggcctggccatgggcaagctctacggcaacgacttcagccagacgaccatttcccgcttcgaggccctcaacctgagcttcaagaacatgtgcaaactcaagcccctcctggagaagtggctcaacgatgcagagactatgtctgtggactcaagcctgcccagccccaaccagctgagcagccccagcctgggtttcgacggcctgcccggccggagacgcaagaagaggaccagcatcgagacaaacgtccgcttcgccttagagaagagttttctagcgaaccagaagcctacctcagaggagatcctgctgatcgccgagcag

SEQ ID NO: 6929 - DNA, 192 bp, Homo sapiens
cctaagcataatataatagattctggggattcagtggaagagtgagagtggggtgatggataaagtactacacactgggttcagtgtacactgctctggcaacgagtgcaccaaaatctcggaaattactgctaaagaagttactcatgtaaccaaacaccacctggtccccaaaactactgaaattttttt

SEQ ID NO: 6930 - DNA, 94 bp, Homo sapiens; identical to SEQ ID NO: 114
  unsure (14): n=A,T,C or G
  unsure (78): n=A,T,C or G
  unsure (87): n=A,T,C or G

SEQ ID NO: 6931 - DNA, 369 bp, Homo sapiens
ccactctgtctgcaagatgttttagtggaatgttgtagccaaagttagatctgaagttggaagcttcttctcttgctatgtctgctaaagaacgagcatctgccaacaaacctgctactgccattccaacatgccgatcaacattaaaaagtcttttgttggaaccttcttcataaagtttagaaaggactaatttttctaccccaaagacaacaccatctttgcatctgattccaatagctgtactactattttccacagccttcatagcatattcaacttgaaaaactcttccgtcaggagagaatgtagaggctgacaggtcatacccagtgccgattgagctcatcgtgctaaacccaaagggac

SEQ ID NO: 6932 - DNA, 297 bp, Homo sapiens; identical to SEQ ID NO: 323

SEQ ID NO: 6933 - DNA, 563 bp, Homo sapiens
  unsure (403): n=A,T,C or G
  unsure (533): n=A,T,C or G
ccacacattctctaagaagtcagcactttcctggactgggcacttgtggctagaagggtatgcactacttgctaatttctaaaacctcaaaccttaattttcccccatcttaaaatgggaatcagcttctggaaaagctaataactgtttacaattgtcagacttctaaaaagtgctaatttgttcccttaacagagcaaatgatgagagacaccattttcctgcagattaaaaacaatatataaacatatgattcaacgatgtcaacagctttcagtctatgaatcttgtccaggtcactttgggtcacttggttctttcatcagaacatgttcaagatttctgacattcctttttccgaactttcgattttggtgcatttggattttcttgtttgtagaangtctttaacatttccactgcttcctcagcccgatatccagggatacactgaaatggtcccccagtgtttggtaggtcagcagaggcaatatttagaacagagccacaaccaccaaatcgttcattctganagccatatacaaccagcgggattttcatca

SEQ ID NO: 6934 - DNA, 66 bp, Homo sapiens; identical to SEQ ID NO: 113
  unsure (12): n=A,T,C or G
  unsure (31): n=A,T,C or G

SEQ ID NO: 6935 - DNA, 491 bp, Homo sapiens
  unsure (370): n=A,T,C or G
  unsure (478): n=A,T,C or G
ctggcagctcacattttacattagagagtggggtccccacattttacattacagagcggggtccctgagctgcaggaggagagcctgcagggctcttgggtagaattgcacttttgcaataagggaaacgggagcaatgtttcagcctcagtttctatttataatactgacacaaaaagaatattgctggatacatagcatggatctagatagagcagctccaggagttctcacggtgacagcccccctcactcacagacaccatgtgatactaatagggcttagacacaaagcactgaattcccaaagcattgaaggagaaagacagctctcagtctgagtaaaaccgtattgagagaagaaaagaggntgaaagaatcttaaaagacaaattcagattacatgtaacattggtcaaattgaccagaaaatattcttccaaaagaagttcttctctaaaacaccaaaagtgcacagntactctcagcatg

SEQ ID NO: 6936 - DNA, 386 bp, Homo sapiens; identical to SEQ ID NO: 115
  unsure (260): n=A,T,C or G
  unsure (261): n=A,T,C or G
  unsure (285): n=A,T,C or G
  unsure (352): n=A,T,C or G

SEQ ID NO: 6937 - DNA, 365 bp, Homo sapiens
cctatttaagggttcccagcagaatgggccattgtccgcctctccagttgcatgactggagtttgatggccttttgttctttctgagctgtagctggagcttgcttgttggttcacaggaacaagcaaggttcatctaaactgtaggcaaaaacttaaaaacaactagtgagtttagaatttaatggcaaatgtatgataagttttgaaacacaatttctttctctctagtcctcatttttggaaaaaacaaacaaaaaaacataaatcatgataggactgagttgtttgcaaaatagattgtagtcttacacttggtctgattatttgcataaagtgcaagaggaataattatttctacatagg

SEQ ID NO: 6938 - DNA, 511 bp, Homo sapiens; identical to SEQ ID NO: 470

SEQ ID NO: 6939 - DNA, 308 bp, Homo sapiens; identical to SEQ ID NO: 117
  unsure (17): n=A,T,C or G
  unsure (31): n=A,T,C or G
  unsure (32): n=A,T,C or G
  unsure (182): n=A,T,C or G
  unsure (227): n=A,T,C or G
  unsure (229): n=A,T,C or G
  unsure (237): n=A,T,C or G
  unsure (260): n=A,T,C or G
  unsure (285): n=A,T,C or G
  unsure (288): n=A,T,C or G

SEQ ID NO: 6940 - DNA, 203 bp, Homo sapiens; identical to SEQ ID NO: 118
  unsure (15): n=A,T,C or G
  unsure (16): n=A,T,C or G
  unsure (17): n=A,T,C or G
  unsure (193): n=A,T,C or G

SEQ ID NO: 6941 - DNA, 293 bp, Homo sapiens; identical to SEQ ID NO: 119
  unsure (235): n=A,T,C or G
  unsure (243): n=A,T,C or G
  unsure (250): n=A,T,C or G
  unsure (257): n=A,T,C or G
  unsure (259): n=A,T,C or G
  unsure (260): n=A,T,C or G
  unsure (273): n=A,T,C or G

SEQ ID NO: 6942 - DNA, 436 bp, Homo sapiens
  unsure (245): n=A,T,C or G
  unsure (343): n=A,T,C or G
ctggaaaaggccaaagagagtcttaagaacgtggatgagaacattcgcaagctcaccgggcgggatccgaatgacgtgaggcccatccaagccagattgctggccctttctggtcctggtggaggtagaggacgtggtagtttattactgaggcgtggattctcagatagtggaggaggacccccagccaaacagagagaccttgaaggggcagtcagtaggctgggcggggagcgtcggaccanaagagaatcacgccaggaaagcgacccggaggatgatgatgttaaaaagccagcattgcagtcttcagttgtagctacctccaaagagcgcacacgtnggagaccttatccaggatcaaaatatggatgaaaagggaaagcaaaggaaccggcgaatatttggcttgttgatgggtacccttcaaaaatct

SEQ ID NO: 6943 - DNA, 266 bp, Homo sapiens; identical to SEQ ID NO: 120
  unsure (131): n=A,T,C or G
  unsure (205): n=A,T,C or G
  unsure (211): n=A,T,C or G
  unsure (249): n=A,T,C or G
  unsure (250): n=A,T,C or G

SEQ ID NO: 6944 - DNA, 335 bp, Homo sapiens
aaaagaaaaaaaaaaaaaaaaacaaacccacatgatttcaaggagtctggcattcctgaatccttcttccctgccaggtgcctgtcacctgtcttcactgcctccttttccctgtcatgctcatcagcttatggcttctgtctaagcacctgaacagaggactgaaacctccactgcaggctggttttaggtcttgaattatgtaagaatcttgcacagcactgctaatgtaaatttcagttgtttttccctctaggacaaacacttaccaaaatatgcaacttttttttggtgggaagagagattgtcctgtgatttctacccatttcctgagg

SEQ ID NO: 6945 - DNA, 188 bp, Homo sapiens; identical to SEQ ID NO: 116
  unsure (90): n=A,T,C or G
  unsure (122): n=A,T,C or G
  unsure (167): n=A,T,C or G
  unsure (177): n=A,T,C or G

SEQ ID NO: 6946 - DNA, 193 bp, Homo sapiens
cctaactcagggtcccgaccctcaagggcacagagagcagagcctacgatgactggggtctcctcccctttatagccaaactcggtgagcagctcccggatctccagttccaccagttccaccatctcagagtcctggacagcgtcagccttgttcacatacaccaccacatgctccaccccaatctgtctgg

SEQ ID NO: 6947 - DNA, 268 bp, Homo sapiens
cctagagaacgagctgctcatcatgtttctaatataatttctggggtgaaatgaatgatttccttactggcttagagaaaaccaaggtcaataaaatgcagattgacttaactattagaaaagatgggatgacttctgggaaccacttaactcttcaaatgactgttgaaagagaaaaagcaaaactgaaatcccaccagaccattttgtgtgcctgtttctaatcgatacaaagttaagcatgagctaaaatcagacaaagcacttt

SEQ ID NO: 6948 - DNA, 282 bp, Homo sapiens
cctgggccagcttgggcaagccaagatcagatgtctctgtgttcgggaaggtctccgtgtgggaaagcccttgggggatcccgggtgaggagtgttgccccatccagagaatgaatgagttcctttaagtgccaccgccagcaagcccagaggcacacagtccgagtgcacccgcttagcctttacattcctctccaccgacaaaaggaaggggaaactcaatcagcaggacttcagaaagggccttgtgtttatagctttgtcaagtaaatttggacgcag

SEQ ID NO: 6949 - DNA, 345 bp, Homo sapiens
aaaagctagtaagaattgaaatttagcatcacagttcttgaccagaatataattacagctacccctaatgtgagggtagggacagcgatgtgtgttatatccccagcatctagcagtgtcacagaagagacaaagacatttttctggtatgcatgagtataagaatggtttgcctaaataagactgtcctcatggctctgtgactgtgcctcttgtcaggtgtatgagtttagagtcaaagaatctagcatcatagctccagctcccgctgaggatgtggatactcctccaaggaaaaagaagaggaaacaccggttgtgggctgcacactgcagaaagatacag

SEQ ID NO: 6950 - DNA, 521 bp, Homo sapiens
cctcaggaatagtacggaatgcccgaagaaaattattgccctggcaagggtcaccacgagagaggtccaacatgtgaaacaggaagcccagctcacatgccagacagaactccttctggcaaaggtggttttgaattagacagcgtacaggctccaggaaatagagcacctggatcatgcagttacagtaggcgttgggaatgtggggctctaatccagcaaacaaggtcttattgtagtgtttgaagtcaaagtcctccagccctagcttggaatatttgatggtcaccttgcggtatttcttagaaaccatgtggagatgtggttcctcttctcgtcctactggtgactcagtgacctggctgaagctgtcaaattcactgtctgactccttgagtctgtagggtatctgattgcgcagcctggtgcggggattgggcgcatagccaatgaagcccaccttcttcatggtgcgcagaatctctgcatccacgggtggtgctcgcctgggagctggagca

SEQ ID NO: 6951 - DNA, 425 bp, Homo sapiens
ctgttacttcacagctctgacctcagttttctcatctctaactaggtcaccggcacttccctcagggtttgtgagagttaaatgaagtcaagtgcggaacacccagcacaggccctggtgcatcgggaacgaatctgctctgggtgcaccctcacctcacagccagccacatgtgcaagggaagctttcagaatgtccttgagtaagggtgccagcagccctttcttgatcctgaccaggtcctcaagggagaacaggtggagctcatcagtcaagtgtcccggcacctgctcgaactcctttaatgcactgccagagaggaaacaaagaggaattcagaaacccacccacacagaggacagggaagaatggggccagttgttttctcttggcactcacacttaattttttttttaactcaattt

SEQ ID NO: 6952 - DNA, 373 bp, Homo sapiens
aaaactaaaaaaatcaaaacacttcattgtgaaggtacagaaataaacagtgatgatgagcaagaatcaaaagaagttgaagagactgctacagctaagaatgttctgaaactcctttctgatttcttagatagtgaggtatctgaacttaggactggagctgcagaaggactagccaagctgatgttctctgggcttttggtcagcagcaggattctttctcgtcttattttgttatggtacaatcctgtgactgaagaggatgttcaacttcgacattgcctaggcgtgttcttccccgtgtttgcttatgcaagcaggactaatcaggaatgctttgaagaagcttttcttccaaccctgcaaacactgg

SEQ ID NO: 6953 - DNA, 210 bp, Homo sapiens; identical to SEQ ID NO: 121
  unsure (14): n=A,T,C or G
  unsure (182): n=A,T,C or G

SEQ ID NO: 6954 - DNA, 310 bp, Homo sapiens
aaagtacttttaagaaaaaaagcagggccttggaagttttggttcttttttcctcccctgttgcaaattctcatggtttgggttgggtggtggagagcgcgtgtcatctgcgggtggcactgcccacggtgggcgggcgggcctctctactcgaaggtgaccacgtttagattctgagacgggaagtggagggtgaataggtcacggcggcctttttttttttagtttaacttttccttttttgctgtctagtcatcctcgtcggtcttctgcttcttggtatcgacatcgtcatcctcatcatcttcag

SEQ ID NO: 6955 - DNA, 292 bp, Homo sapiens; identical to SEQ ID NO: 122

SEQ ID NO: 6956 - DNA, 400 bp, Homo sapiens
ctgggtttatccaaaccaataaataatgctacattagaatcctgagccagggactgtgatggtgttagacaatccatgatgtccacaagttaataaagaccccactttaagaacaaaatatggctgggagcggtggctcatgcctgtaatcccagcactttgggaggctgaggcagtggatcatgagttcaggagattgagaccatctggccgacatggtaaaaccccgtatctactaaaaatacaaaaattagctgggcatggtggcatgtgtctgtcgtcccagctactcaggaggctgaggcaggagaatcgcttgaacctaggagatggaggttgcagtgagccaagattgcagcactgcactccagcctgggaaacacagcgagtccccgtcttt

SEQ ID NO: 6957 - DNA, 550 bp, Homo sapiens
  unsure (528): n=A,T,C or G
ccagtctctcagaaatgtcctctgaactggcactcaattttgtagcacataatccttttccagttttctctaaatggactgtgcactcaggggaactgttctctgtggtttccagatagttgttgggaacagatgcctgcaagaagctgtcctgttgaccatccaaagtgtcttctacgcccaactggatggcttcggcaatttccacctcatctgcaatagccatcaaacggcgacgcatcctggtgaagtgagtggaactggaaacactcagcatttctaacagttttgaaaacacatggggtactgtagtaaccattcttgcagaactcaagtagatccttctggaaagtttgccaaccattgagtgggaattatcaatggactgcaaagcaaaggttaagagggacagcagcttcttatacctgatttcaacaggctcagcttgtgaaacatcagtactgacaatatgaggataaaattcagcaggaaattccaacaacagtctatctataagacaaaggcggncaagaagttcttgccaattgtt

SEQ ID NO: 6958 - DNA, 357 bp, Homo sapiens
  unsure (167): n=A,T,C or G
  unsure (276): n=A,T,C or G
  unsure (303): n=A,T,C or G
  unsure (310): n=A,T,C or G
  unsure (339): n=A,T,C or G
aaattttgaacttgtttcaatcaagttgtagccaaaacaaaaaggtcataattactgtgctcatataagagatgtgacgagggaaggagggagggagaaatgcaggaaaggagtggggagaggaggaagggaggaagagagggaggaaagagtaaggtacacatcangttaaaaggggcagaattaggaataaaactaagcacttaatctaatctgatcaggaagaaactttgccctttattcagattttattgcatttcataatcacagaaaaanaacatccaactttattcttaaatgtgnctcaagntaaaaatggcaggaatgaatagcccttanttagcacacactattttt

SEQ ID NO: 6959 - DNA, 413 bp, Homo sapiens; identical to SEQ ID NO: 324
  unsure (11): n=A,T,C or G
  unsure (16): n=A,T,C or G
  unsure (17): n=A,T,C or G
  unsure (368): n=A,T,C or G
  unsure (387): n=A,T,C or G

SEQ ID NO: 6960 - DNA, 537 bp, Homo sapiens
  unsure (485): n=A,T,C or G
  unsure (497): n=A,T,C or G
  unsure (500): n=A,T,C or G
  unsure (510): n=A,T,C or G
cctctggccggagctgcctggtcccagagtggctgcaccacttccagggtttattccctggtgccaccagccttcctgtgggccccttagcaatgtcttaggaaaggagatcaacattttcaaattagatgtttcaactgtgctcctgttttgtcttgaaagtggcaccagaggtgcttctgcctgtgcagcgggtgctgctggtaacagtggctgcttctctctctctctctcttttttgggggctcatttttgctgttttgattcccgggcttaccaggtgagaagtgagggaggaagaaggcagtgtcccttttgctagagctgacagctttgttcgcgtgggcagagccttccacagtgaatgtgtctggacctcatgttgttgaggctgtcacagtcctgagtgtggacttggcaggtgcctgttgaatctgagctgcaggttccttatctgtcacacctgtgcctcctcagaggacagntttttttgttgntgngtttttttgnttttttttttttggtagatgcatgact

SEQ ID NO: 6961 - DNA, 507 bp, Homo sapiens
ccttgctgcagggtgtgacagtgagcgattccatgcctgtgcgggggttgtagctcttctgcttacagaaccctggatccagcacataaatgatgccctcaatggtgagtgatgtctcagcaatgttcgttgccacaaccacctttcgtgccccaggtggtgtgggctggaagatacgggcccgcatgtcagagggcagattggcataaatgggcagcaccaggagctcccggattttggagcccaggcggcggcagcgatcctggagcatctcacaggcagcctcaatctcctcctggatagagggtagggagagcagcaggggtcccagagtcacagaaggccaacatgccggccctgtcttcccctgggatacatcatcccctctccccaccatgtcaggcacctgtcctgtcaggaacaccaggatatccccagggggctgggtcacatggatctgcaacacagatactacacaagcttccaagtagtcagcctctggagcct

SEQ ID NO: 6962 - DNA, 243 bp, Homo sapiens; identical to SEQ ID NO: 622

SEQ ID NO: 6963 - DNA, 371 bp, Homo sapiens
aaaaacagatgcagacacaagggagaaagccatgtgcaggcaaatgtggagactgaagaatgcagccatgagccaaaaacaccaaagagtcaccagaaactaggagagaaatgtggcgtgggttctccagacacagagaaaggatcttacagagaagaaaagattatgacagggaaacttatctgccaaataatattagtagctaagatttctgagctcttatataccaggcaatattctaagcagattacatgtactgcatctttattttattttatttttttaattttgagctcttgctacattatccaggctggtctcaaactcttggggctcaagggatccacccacctcagcctcctgagtagctg

SEQ ID NO: 6964 - DNA, 453 bp, Homo sapiens; identical to SEQ ID NO: 636

SEQ ID NO: 6965 - DNA, 324 bp, Homo sapiens
aaatgacgctgatcttaagtctgaaataaatggaaagcagaaaaggtgagccagttgatttgaatgcattggatattagtgttagaaacaatgtatagtttagattgaaactgaactgacttatttagcacttaaacaaaaatttgacaatgtttttagttttttttaagacagcttagtgtggtgatacttagaattctatggtttgatgtttcttttagaaatgagaagtatagttttattttttaatataaaaaatggttttaatactaaaactagtaatttgatactagttgtttataaacattgtaaaatatatctttt

SEQ ID NO: 6966 - DNA, 364 bp, Homo sapiens
cagagtctcgctcggtcacccaggctggagtgcagtggcgtgatctcggctcactgcaagctccacctcctgggttcaggccattctcctgcctcagcctcccaaatagctgggattacaggtgcccaccaccacactggctaatttttgtatttttagtagagacagggtttcacaatgttggtcaggctggtctcgaactcctgacctcaagtgatctgcccacctcagcctcccaaagtgctgggattacaggcatgagccaccaaatctggcccaaattgagtttaataaagagcttgagtgatgctcagattagggagggagtgaccgggaatgctggggtctggaactgggggcccgg

SEQ ID NO: 6967 - DNA, 299 bp, Homo sapiens
cctttctccatggggcctggaggagatgcattagtctccgggtaaccggcaggaagggcctccacagtgggagcagccggatgcagcctggtcccggggcctgagctgggattgggcagggtcagggctcctcctctcttccagggcagatgtctgagtgagggacagaggctggttctgatgaggggccctgcagtgtccttagggacgttgcccagtgactcctggggtcaaggacagaggctgctggggtgggcctgggagctgctgagtctcatagtctaggggagcagccccaa

SEQ ID NO: 6968 - DNA, 474 bp, Homo sapiens; identical to SEQ ID NO: 123
  unsure (374): n=A,T,C or G

SEQ ID NO: 6969 - DNA, 215 bp, Homo sapiens; identical to SEQ ID NO: 637

SEQ ID NO: 6970 - DNA, 318 bp, Homo sapiens
ctttggaagaagggaaggtaaaacttacactcagtactgattgctacccttttctcatggatatggaagcagacaagtagagtttgatttgatttgcctctatgctaaatgtttttcttcttaaattcagaagcaattgcaagaactttctcgatacatatggcccctctgataaaggcagggggaagaactgccttccagtgaacactccccaaagcaggatccagaatgctgcaaagaggagcccagccacctatggtcattctcagaagaagcacaaatgctcagtgtattacagtaaacacaaaaccagcacag

SEQ ID NO: 6971 - DNA, 160 bp, Homo sapiens; identical to SEQ ID NO: 126
  unsure (96): n=A,T,C or G
  unsure (151): n=A,T,C or G
  unsure (152): n=A,T,C or G

SEQ ID NO: 6972 - DNA, 125 bp, Homo sapiens
  unsure (99): n=A,T,C or G
ccgagggggaagaggtttgttaatacgttcgccatgtgctacgatcttgggacgaactgagccacgagcgtggctttgagggccgtccgaacgctgcangccggccaggtccctgggcgtccagg

SEQ ID NO: 6973 - DNA, 286 bp, Homo sapiens
  unsure (16): n=A,T,C or G
  unsure (17): n=A,T,C or G
  unsure (252): n=A,T,C or G
aaaaagcatttagatnnagagattgaaaagagcgaggcatctaaggctggggggtggggaaggaaaagctgtggagcactacccctcccccaggccacaaaagtcaagggatgtctcttccactggtagcctcaccacacagcttactgaaatcaacaatgttaaatatttagcttcacaaactctgtaaaaatgagttgttgtgacctacaaaaaaggtatatacatattttacataatacaatatcttanaggtcatattttacaaaaaaatctattcacagaa

SEQ ID NO: 6974 - DNA, 562 bp, Homo sapiens; identical to SEQ ID NO: 471
  unsure (343): n=A,T,C or G
  unsure (542): n=A,T,C or G

SEQ ID NO: 6975 - DNA, 445 bp, Homo sapiens
cctggggacatcgcagaatgccttcccctcattgtattgccctctgtcctagacatcctagcatgacacaagatactattaacatcctacagagaaaaagaaaaacacccaggtcacactctaagagtttatgatggcaaccatcctcaggtttttccaaatctgattttattccccaaggcaatttattcacattggaagatacccattgtgatggggccagcaactttcatcttagcagcagcttgtatttaatacatttgtatttaagacatgtgcagaggatttttgaaacagaatttaatataatagtaatataaattcaacacttgtttctcatataaagaaagcaaacatttagccttttattaagttactgaagaaaattttcttaactcagtgaagaatatctccccaaatttacagcaaccttcatatttacctc

SEQ ID NO: 6976 - DNA, 388 bp, Homo sapiens
ccaaatctggatttaagttcaactcagccagaatccaaagcagcttcttttagattcactatgccacatcccaccaaacccaacccagcacattgtattaggaaaaatcctaaaacttttgattaaatggtaaaaggaagtaactacctggagaaaataaggcttccgctaccttccgtcctccctcccagggcttggcaaaaagagatcttgagcatgaggaaggaacagcttcttcagaaacaggaattagctgtatgttggcttctgcataccctcttaagattcaatatggggcaggacacagtggctcacccctgtaatcccagcacttcgggaggccgaggcatgtggatcacttgaggccaggagttcgagaccagcctgg

SEQ ID NO: 6977 - DNA, 434 bp, Homo sapiens
  unsure (259): n=A,T,C or G
  unsure (417): n=A,T,C or G
cctggaaaacattctccaaaaagaagctgcaacatgtgtggacaatgggcttttcatgcctctcttactgtctcttactgtctattgacctggtgcaagaaacatgctctggtgatggctgtgagggaggaatcaccaccattccccccgactcatattacagatggggaaaccgagacacacattcaacaaagcgcgcatcacatggggagttcagggttagcctggagtacgaacacacgttctccccatggcccantcagcggcccacctggcctcttcccctccctttagtaaccccatcagcagcagcataaaaatctaacccttcattttgctgaaagcccctgcagatgacagtttccttcctatcatgtctgcagagctccaaggctgggggcgatgttgaggccgaanccagccacagtgcctca

SEQ ID NO: 6978 - DNA, 200 bp, Homo sapiens; identical to SEQ ID NO: 124
  unsure (96): n=A,T,C or G
  unsure (97): n=A,T,C or G

SEQ ID NO: 6979 - DNA, 552 bp, Homo sapiens
aaaccaaagcatttttttatagtttctagctaggtttatagaaactagtggagctatgggcagtcagttaaaaacaggccatagatagcataatgaattataacacccctgtccaagtcctatagagaaaaaaaaaatccctacttttgactacagttacacagcagatcccaaagagctttgtagtagtttaacgtactacaacttatcagaaagatgaggcacttgacagttacattaaggagctaaagtcaatacggcagttgtagatttgctaatgccactgtatttttctgctcatagcatggacccattcatatgactaatttaggtacaggcttctccagtcagaatgagattgaaggtgcaggatcgaagccagcaagttcctcaggcaaagagagagagagggacaggcagttgatgcctccaccagcctttccagtgactggaataaaaacagagtccgatgtaaggaatgggtctgggaccttaacagggagccatggtgagtgtgatatagctgggggaacaggggagtggctaagactg

SEQ ID NO: 6980 - DNA, 155 bp, Homo sapiens; identical to SEQ ID NO: 125
  unsure (11): n=A,T,C or G

SEQ ID NO: 6981 - DNA, 201 bp, Homo sapiens; identical to SEQ ID NO: 127
  unsure (96): n=A,T,C or G
  unsure (97): n=A,T,C or G
  unsure (123): n=A,T,C or G
  unsure (133): n=A,T,C or G
  unsure (163): n=A,T,C or G
  unsure (167): n=A,T,C or G

SEQ ID NO: 6982 - DNA, 198 bp, Homo sapiens; identical to SEQ ID NO: 128
  unsure (13): n=A,T,C or G
  unsure (14): n=A,T,C or G
  unsure (17): n=A,T,C or G
  unsure (44): n=A,T,C or G
  unsure (174): n=A,T,C or G
  unsure (183): n=A,T,C or G

SEQ ID NO: 6983 - DNA, 177 bp, Homo sapiens
  unsure (14): n=A,T,C or G
aaaaaatgatgttngaagtgaaaaaaaaaggatattcagggtcaaatcatgtacattacagatattatctaaattcttctagaatttatttttcatgaaatattgatgtattttaatctatgttaaaatatcttcaatgaggaaaatgtcacagaataaatttatattacacatttt

SEQ ID NO: 6984 - DNA, 259 bp, Homo sapiens
ccacctttttgataaagaccagcaccaagaggatggcaaacaggatcccgaagatgatggggatcaccaccagggctctcagccgatcctggggacctggagaaatcaggacttcagcatgcacccctcacctgcagtttctccctaccctcaacctgccgtgacttgtcagactccagaatcttccaatgtcagagctcatctacatcagaaggttcaaaccgcggtccttggggaaatgcggctggcagatgtcttt

SEQ ID NO: 6985 - DNA, 485 bp, Homo sapiens; identical to SEQ ID NO: 129
  unsure (14): n=A,T,C or G

SEQ ID NO: 6986 - DNA, 77 bp, Homo sapiens; identical to SEQ ID NO: 130
  unsure (14): n=A,T,C or G

SEQ ID NO: 6987 - DNA, 161 bp, Homo sapiens; identical to SEQ ID NO: 131
  unsure (14): n=A,T,C or G

SEQ ID NO: 6988 - DNA, 285 bp, Homo sapiens
ctgctccctcctcccccaggggcctggcctcttacaagggattgcgtgacagcgtacacagccttctccatggagatgacatgcaaccctctgcaacatacagggacccagaagtctcggcccccagcccccttcctctctaagactcaagaatctgggctctcagccagatgtggtagctcacgcctgtaatcccagcactttgggaggctgagatgggtggatcacgtgatgtcaggagttcgagaccagcctgggcagcacagtgagatcctgtctctattt

SEQ ID NO: 6989 - DNA, 470 bp, Homo sapiens
ccttggagactcacgagttttgagagcaaaatgacaacacccagaaattcagtaaatgggactttcccggcagagccaatgaaaggccctattgctatgcaatctggtccaaaaccactcttcaggagggtgtcttcactggtgggccccacgcaaagcttcttcatgagggaatctaagactttgggggctgttcagattatgaatgggctcttccacattgccctggggggtcttctgatgatcccagcagggatctatgcacccatctgtgtgactgtgtggtaccctctctggggaggcattatgtatattatttccggatcactcctggcagcaacggagaaaaactccaggaagtgtttggtcaaaggaaaaatgataatgaattcattgagcctctttgctgccatttctggaatgattctttcaatcatggacatacttaatattaaaatttcccatttttt

SEQ ID NO: 6990 - DNA, 577 bp, Homo sapiens
  unsure (400): n=A,T,C or G
  unsure (544): n=A,T,C or G
  unsure (564): n=A,T,C or G
ccacaagaaagacctacaaagaccacatgggaggaaaaagaaacatctgtaaagactgaatgcgtggcaggagtaacatctaataaaattgaagttttggaagaaggaacagctaagatgatcacatgtcctacaaagacagctacaaaagcaagtacaaatggtaagatgcttgagtgaactttgtagagtttattggcactttgggttccctagtggaaatagtgtggtacaggagtagtcaggaatggcttgaatgtctagataaggcaagcttaggcaacacattttaatagtgtagaaacgagtagatgttattctgtaggccctggaaaaattcccagaatacttctggctgtaaatattagatgaaaataactaacaattgctaaaaccatanaaaccaaagttgttttggtggtacagggatattataagttctcactccccctcccccattattagttatgctatcagcaagtgtttttgttcatgtctcctttcttggttggctaaattagcaacagctccaatcatcatgctnactcaagacaatatctgaangctgggagtgctg

SEQ ID NO: 6991 - DNA, 482 bp, Homo sapiens
ctggacaacccgtacatcgtgcggatgatcgggatatgcgaggccgagtcctggatgctggttatggagatggcagaacttggtcccctcaataagtatttgcagcagaacagacatgtcaaggataagaacatcatagaactggttcatcaggtttccatgggcatgaagtacttggaggagagcaattttgtgcacagagatctggctgcaagaaatgtgttgctagttacccaacattacgccaagatcagtgatttcggactttccaaagcactgcgtgctgatgaaaactactacaaggcccagacccatggaaagtggcctgtcaagtggtacgctccggaatgcatcaactactacaagttctccagcaaaagcgatgtctggagctttggagtgttgatgtgggaagcattctcctatgggcagaaggccatatcgagggatgaaaggaagtgaagtcaccgctatgttagaga

SEQ ID NO: 6992 - DNA, 314 bp, Homo sapiens
ctgttgttagttatatagcagtacaggacatatgtaatcttgttgagatgtgtcttctaaagacacatttctgagtagctcaaacatatcaggaaagttggttctgtgtacttttgttaatcattgttttgattcaaacttaagtaatcttagatgttgatttggtttttattgtatttcctttcctaattaggacttaaccaccaccatgtcgagcaaaagaacaaagaccaagaccaagaagcgccctcagcgtgcaacatccaatgtgtttgctatgtttgaccagtcacagattcaggagttcaaagagg

SEQ ID NO: 6993 - DNA, 294 bp, Homo sapiens; identical to SEQ ID NO: 132
  unsure (234): n=A,T,C or G
  unsure (236): n=A,T,C or G
  unsure (237): n=A,T,C or G
  unsure (249): n=A,T,C or G
  unsure (253): n=A,T,C or G
  unsure (266): n=A,T,C or G
  unsure (278): n=A,T,C or G

SEQ ID NO: 6994 - DNA, 483 bp, Homo sapiens
  unsure (160): n=A,T,C or G
  unsure (387): n=A,T,C or G
  unsure (465): n=A,T,C or G
aaaataggtgtcctgataacttccaggatattattcggaacacccgtttccccaactacgataagtccattgccggatgctgaataaacttcgcccattaccacttggatttcttgatagtcttatgtttccatcatccatcgtaatgtgttcagctcancttcctagaaacattgaacaacggtttagaaattttgcccaataacccggcaccctctaggtttttaacagtgaatgttacttgtgcaagtcaggaatctgataccaattaaatggtgacagctttgccaataaacaaggatatgctcttccatggctaggaagggagactgccacggctgacaggtcccaaagatacatggagattcacaatccagaattaaccancaaccaaactgctacaggttattactcaccatctggctcaaactgacagttctcggggtgctagggcacaagagcganagagtagactcaagatgg

SEQ ID NO: 6995 - DNA, 270 bp, Homo sapiens
cggaggtggtcaaggctaaagccggagcaggctctgccaccctctccatggcgtatgccggcgcccgctttgtcttctcccttgtggatgcaatgaatggaaaggaaggtgttgtggaatgttccttcgttaagtcacaggaaacggaatgtacctacttctccacaccgctgctgcttgggaaaaagggcatcgagaagaacctgggcatcggcaaagtctcctcttttgaggagaagatgatctcggatgccatccccgagctgaagg

SEQ ID NO: 6996 - DNA, 433 bp, Homo sapiens
aaaacaacataaatagaatacacttcttttaacaaagcctggccttggtggctttctagcttgcagtctaagtaacgtttggtttgcagaagggattccctgggagacggctgtgtggggcaacctcacttactggttgtgtgttctccatgggaaaagcaccagatggggaagcccaggatcagatgtaagctgcaagcttctttctctcttcaaactgcttgtccactgccagagacagggcctggaggaacccctctatggtgacggtgggggcctggacatacagcgcatgagccagaaaggggagttttctcaggacccggccgctgaggccctcgctcttccttgaaatgtcattcaaaagaaggctcaattttgacacgttgttttcaatgaagccaatcatctctagctctcggagggtcagcag

SEQ ID NO: 6997 - DNA, 419 bp, Homo sapiens
cctcaggccccttgcttgggtcatgctgccccctgtcggctgctgcccctgcctcttcctctgagttctaacaacacagacactggtgcctgaaagccctgctgctgccagggagtcagaattctggctgcctctacttgggaatctcctcccatgtggggatctgcagaacatccagatggggccatcccacctcatgatccattcactcccagtgggatacactggaattcaacccggagactggagcccaacagattaaggcagaattctccttgctctggaggcaggtctgcgggaagggggtgaagtctagctgcccctcatgtcccatgccggtgagggtacttggcttcccacagctaagcccaggagcttcctatatcccatctgctgagacagcaaggggtgcggcctgg

SEQ ID NO: 6998 - DNA, 449 bp, Homo sapiens
ccaaagccagacctggcagaactgatggatacctggtgaggcagcggagcccctgggctcccaccccattccctcctcccggggctgcacaggtgagtaggtggaaggtaaggggggcagggaggggaaagaggtcctgggcttaaagcctgggcttggagtactgctccttgacactcagggtcaggcagagagaaaagagacagccttcaaggcagtccatgtctgggtgccccgggtcaggtggggagtgggggccatttttccctgagcacaggctgggagggagtggagggatgagcaggatgggatgggctgtccctcgggtttggtatatttgctcctagagcagcccaggaggcacggtggctctgaagcatcactcacttctgtcccgttcttgacagcgccattcgcgaacgatttcccaagttactacgcctggatgg

SEQ ID NO: 6999 - DNA, 362 bp, Homo sapiens
ggaaggaaggaagaagaaagacaggaaggaaggaaaaaggaggaaagaaacaaaagggcaagcaggccgagcaggtctaggattggctagtttgaataattttggcaggctgcaggtgtagggactgtcttaagttgcctggaagcttggaagctataatagagaatggggagggtgggaatatgagccttggatgggctggctactatgaaaggcccactcctggatgagttatttcctctctctaggaattagctaaccctgatgggtccctccccagtcagcaaggccccggatgccacaacttaaagtacagaaaatgtagttaacacagccaccacgaattgactagttgagtgttt

SEQ ID NO: 7000 - DNA, 381 bp, Homo sapiens
  unsure (14): n=A,T,C or G
  unsure (15): n=A,T,C or G
  unsure (17): n=A,T,C or G
aaagttttattatnnanacacatggaattaacggtgttatccatgtatttgcaacagcagagaaagagtgagagtggaccatccccataggggacacttatcctttggctaaactaatataaataatggaaataacacctaatacaataatacagcacataaaagagattacattaagagaagagacaggaactgcggagaggagtcctgagtatggaggagatgcggctcatggagaagcatccaggctcaggtgaccttccctgaagacttcctgtctctgagcagctcagttcagttccaggtcatacacgtactcctggacccaggactcactggggtcagcgcagacttgcttgcctcttttggtttggaatacca

SEQ ID NO: 7001 - DNA, 551 bp, Homo sapiens
  unsure (465): n=A,T,C or G
  unsure (512): n=A,T,C or G
ccttgcctcagatccaaggtcactcggaagaggccatgtctaccctcaatgacactcatggaggaaatgctgagagaagcattcagatgcatgacacaaggtaagactgccaaaaatcttgttcttgctctcctcattttgttatttgttttatttttaggagttttgagagcaaaatgacaacacccagaaattcagtaaatgggactttcccggcagagccaatgaaaggccctattgctatgcaatctggtccaaaaccactcttcaggaggatgtcttcactggtgggccccacgcaaagcttcttcatgagggaatctaagactttgggggctgtccagattatgaatgggctcttccacattgccctggggggtcttctgatgatcccagcagggatctatgcacccatctgtgtgactgtgtggtaccctctctggggaggcattatgtatattattnccggatcactcctggcagcaacggagaaaaactccaggaagtgtttnggtcaaaaggaaaaatgataatgaattcattgagcctct

SEQ ID NO: 7002 - DNA, 298 bp, Homo sapiens; identical to SEQ ID NO: 133
  unsure (24): n=A,T,C or G
  unsure (150): n=A,T,C or G
  unsure (156): n=A,T,C or G
  unsure (163): n=A,T,C or G
  unsure (167): n=A,T,C or G
  unsure (249): n=A,T,C or G

SEQ ID NO: 7003 - DNA, 228 bp, Homo sapiens; identical to SEQ ID NO: 329

SEQ ID NO: 7004 - DNA, 373 bp, Homo sapiens; identical to SEQ ID NO: 134
  unsure (260): n=A,T,C or G

SEQ ID NO: 7005 - DNA, 506 bp, Homo sapiens
  unsure (15): n=A,T,C or G
  unsure (425): n=A,T,C or G
gttggtttttttagnttctctctctgatctttagtttttccctttgttttcggtttctgggactttctcacactctcccctttcctccctttccccttttcctcatactcctcatttcttctgttttccctctgaggtcctatttgaaatgttttatttttcttctccctaaccttccagccctctcctctccctccccctgtgggcaggacctgaggctctaaagggcactccagtgtctcccttcggtctttcctgtcccttcaccgtcttgcttatcttcccacgggtggagaaaggtgccctgcctctgggcttttgctatctggccctctgtcttccacctcggggtggagggagttggcgggagcagtttttgaatgactgcagtttggggttggtgaggagagggaggttttcttcanggcctgctatttcctgagccttcctctctgaagcttgggaaatgacaccttttttactacgttagtgtttcccagagattt

SEQ ID NO: 7006 - DNA, 540 bp, Homo sapiens
cctacccactttagccagcgtcccctccagcagccatcagcaagccaacccactccaagccagggccccctttggtccttgcacttgaggtgctttgttcagggctgggtcaggagtggcagagacgatgtccaccacctcagtactggggaaagtagcctggttcctcctcgtgggtccagctacttggactgctggctgggttctggaagctgcctcggccccagggcagtgctaagcagctcagtcagggcatccagcttccccgccagcgtgtcaatctgtttctccagggcccggtgtgagctgctcagattctgctgcaggtcatacaggatcatgtgcatcttggagatgtccaccatggagttcacttgttcccggagcttccggtgtttcagccgcacctggcggagcgcgttgatggcggccagcagcttgcgctgatgcctgcgggcagcatgagactccttcctgcgagtatgtttgtagaacatccaggcttcttgtagcactcgggcagcggactccttcatctct

SEQ ID NO: 7007 - DNA, 402 bp, Homo sapiens
ccaacatgatgaaaccccgcctccactaacaacacaaaaattagccaggtgtggtggcgggcgcctgtaatcccagctattcaagaggctgaggcaggagaatcgctggaaccggggaggtggaggctgcagtgagccaagattgcactccaacttgggcaacagggagagactcagtctcaagaaaaaaacaaacaaacaaaaaaaccaaccaaacaaaaaaactttcttgtggtacttatcttttttgatcatttcatcttggaaactcatatcatgttcaaataaacacaataaagaaggaatgttcccagaccatgctattcaatgtggactttcttttataagctatgagaagaatactttggagaagcaagaaacttgggttattttttgttattt

SEQ ID NO: 7008 - DNA, 406 bp, Homo sapiens
cgggcggagaagctggagtgactctagggcagccgcatctttcgcgtcaggatctcaccaccttggatgttaccaagttgacgccactttcacatgaagttatcagcagacaagccacaattaacataggtacaattggtcatgtagctcatgggaaatccacagtcgtcaaagctatttctggagttcatactgtcaggttcaaaaatgaactagaaagaaatattacaatcaagcttggatatgctaatgctaagatttataagcttgatgacccaagttgccctcggccagaatgttatagatcttgtgggagcagtacacctgacgagtttcctacggacattccagggaccaaagggaacttcaaactagtcagacatgtttcctttgttgactgtcctgg

SEQ ID NO: 7009 - DNA, 487 bp, Homo sapiens; identical to SEQ ID NO: 135
  unsure (429): n=A,T,C or G

SEQ ID NO: 7010 - DNA, 194 bp, Homo sapiens
  unsure (91): n=A,T,C or G
cctacagacttatttcttcttggacacacccacggtgcggtcacggcggccagtggtcttggtgtgctggcctcggacacgaaggccccanaagtgacgcagccctctatgggcccgaatcttcttcagtcgctccaggtcttcacggagcttgttgtccagaccattggctaggacctggctgtattttccat

SEQ ID NO: 7011 - DNA, 310 bp, Homo sapiens
aaaggatggcccggcccccagtaaacgccgattcctgctcgcggccttctacgcccattactggagcagcagccatcagtgtagacgacgacgaagtctcccatgtaggaaaacgtgtctctgctaactggaggcgccggctccacgctcgacttcatgtgctttgcatacggctctgcgctttcatgtccatctccatccagtggctcacggagtcgcttgctggctttcgcctccgattcttgtccatgttgattttcatgcccttctgaaacttccgggcttgcagatttcctgacaaaggcccagg

SEQ ID NO: 7012 - DNA, 368 bp, Homo sapiens; identical to SEQ ID NO: 136

SEQ ID NO: 7013 - DNA, 202 bp, Homo sapiens
ccaatatggtgaaacctcatctctactaaaaatacaaaaattagccaggtgtggtgctacacgcctgtagtcgcagctacttgggaggctgaggcaggagaatcgcctgaacctgggaggcggaagttgcagtgagcaagatcatgaaaagcaaaatactcaaggacttttaatataaccaccaacacagtgtgccttctgg

SEQ ID NO: 7014 - DNA, 472 bp, Homo sapiens
  unsure (422): n=A,T,C or G
cctcggcctcccagagtgctgggattacagatgagagccaccgcacctggcctggcaaacttcttttacaaagagtcagagagtaaatatttcaactttgcaggctgtaccatccgtctcaattatgtagctctgctgttgtagcggatgccagaggtcacacgtgaaccaatgagcgtgcctgggttctaatatagctgtagtcccagctactcaggaggctgaggcaggagaatcgcttgaacctgggaggcggaggttgcagcgagcctagactgtgccattccactccagcttggtcgacaaagcaagactccgtctcctcaggggcagacaccgggcaggcagcttcctcggccactgcgttggagtagaggaagagatcctcgtaatccacgtttgcgggatccttctgcctgcanggctgtgtcagcagctccctgcgcggctcaattggcttctgctggtggaa

SEQ ID NO: 7015 - DNA, 153 bp, Homo sapiens
ccagctacaaagtggaatgcttctcgaagggcacggtcaggaggcgggcggccgcctcgtccaagaaccagcacagtttcccggtgtggggctggaccagggcggcgggcagcgggttttcctcctggtcctccaaaacgcgcttcagaacag

SEQ ID NO: 7016 - DNA, 389 bp, Homo sapiens
acgattcacagaggagctaccagatgaacgggaatctggactgcttggataccaggtacaggcttctccagtcagaatgagattgaaggtgcaggatcgaagccagcaagttcctcaggcaaagagagagagggacaggcagttgatgcctccaccagcctttccagtgactggaataaaaacagagtccgatgaaaggaatgggtctgggaccttaacagggagccatggtgagtgtgatatagctgggggaacaggggagtggctaagactggtctaaagctattagttttctcagccgggcgcagtggctcacgcctgtaatcccagcactttgggaggccgaggtgggcagatcacctaaggtcaggagttcaagaccagcttgg

SEQ ID NO: 7017 - DNA, 275 bp, Homo sapiens
ctggtggggtcagtggaagttctgtcactggatctggtttcagtgtctcagaccttgccccaccacggaaagcccttttcacctaccccaaaggagctggagagatgttagaagatggctctgagagattcctctgcgaatctgtttttagctatcaagtggcatccacgcttaaacaggtgaaacatgatcagcaagttgctcggatggaaaaactagctggtttggtagaagagctggaggctgacgagtggcggtttaagcccatcgagcag

SEQ ID NO: 7018 - DNA, 130 bp, Homo sapiens
aaactggtgggtttgggcacgtggttttaggtggctagagcctcagctctcgaggtcatcctgatatgacgaatgttcgtaaagcacttagcacagcacttggcacatcatgagtgttcgatccatgtgg

SEQ ID NO: 7019 - DNA, 419 bp, Homo sapiens
  unsure (15): n=A,T,C or G
  unsure (257): n=A,T,C or G
  unsure (262): n=A,T,C or G
aaaaaataacctagnctatgcaaaacatcaaagtgaattttccatgaatgtttttaatattctcatctcaacattgtgatatatgctactaaaaaccttttcatatacatcttacctcatttcaagtgaattattttaatctttttctctctttccaaaaatttaggaatgtttagtgtaattggatttcgctatcagttcccatccttaagttttgatattcaatatctgatagatacactgcatctttggtcatntaagntttgtttacaaatgtgcaaattatttagagcatagactttataagcattaaaaaaaactaatggaggtaaaacctaaatgcgatgtgaaataattttagtgttgataccgtatgtgtatttttattctaataaacttttgtgttccagattgaaaaa

SEQ ID NO: 7020 - DNA, 282 bp, Homo sapiens
ctaatacgactcactatagggctcgacggccgcccgggcaggtctgagccgtgcgctctccttttgcactcattcctggaggacggattccgctagacaccctccagcatcgctgactttataaagcggaaaaacggaaaacgtgactttgtaatagacaaacattgttttttaatggggttccatgggggggcgttcagcctttctgtttgctgtgtgctgtccagatgcctcttgggcgtcctgttgttctcttcccgtgttgtacgaagggtaccgtgg

SEQ ID NO: 7021 - DNA, 59 bp, Homo sapiens; identical to SEQ ID NO: 137
  unsure (17): n=A,T,C or G

SEQ ID NO: 7022 - DNA, 334 bp, Homo sapiens
  unsure (37): n=A,T,C or G
  unsure (38): n=A,T,C or G
  unsure (46): n=A,T,C or G
  unsure (47): n=A,T,C or G
ccatgtccatggccctgcacttcctcatcctgctcgnnccgccccnncctctcattttccaggtgaccccactgagcgggcgccagtgggtggtggtgctccagatatctctgcctgtcatcctgctggatgaggccctcaagtacctgtcccggaaccacatgcacgaagaaatgagccagaagtgagcgctgggaacagagtggagtctccggtgtgtacctcagactgatggtgcccatgtgttcgcctccgccccccacccttgccaccacactcgcccacttgcccaccgggtcccgccggataaatgacaggcccgaggtcagaatgg

SEQ ID NO: 7023 - DNA, 223 bp, Homo sapiens; identical to SEQ ID NO: 6848

SEQ ID NO: 7024 - DNA, 296 bp, Homo sapiens
ccacagaccgtgggcgcattcttgtccacacgtccagtcttgcccaggggcagcaccaggaaggcccctcccccgctggcctcacagatcagggccacaaacttagggttgacagcacagaagccactgtcccaggtggtctgtgagacgcgcacatcttcatagcactggtcggccttggccggctgtccaaacacgtggcggaacttgctggagcggaccacctgccggctcattctgctgccgagagaggacagtgatcccccaaaagccggaggaggaggaggaggaggaag

SEQ ID NO: 7025 - DNA, 508 bp, Homo sapiens
  unsure (316): n=A,T,C or G
aaaagacaaaaacaaaacaaaaataccacagctcaagataaagagtcctatacagaaatcacaaaaaggacagaccatctaaggaaaaattaaaaagacgacacaaggacaggctgggcagcctgggtcagggctcctggctggtgacctgctttgagtaggtttcttgcaggtacttcttaaaagctgtggggtttttccagagctcggcagcatgtgtgttcaagggactatcaatgttgggttctcctagaaggctctggatggagagcagaatggtcctgacatcatacagggcagaccacttttccttcangatgtccaggcatatgttaccctgggtgtccacgttggggtgatagcagggcgtgaggaacttcactgtgggcgcattgtaagggtagccactggggaactctagcgagagcttatacctcaggtcttcatatactgttccagccttattcttaacaactttaacaaaccccatcctgcggaacagagaccg

SEQ ID NO: 7026 - DNA, 151 bp, Homo sapiens
  unsure (12): n=A,T,C or G
  unsure (14): n=A,T,C or G
  unsure (48): n=A,T,C or G
  unsure (95): n=A,T,C or G
  unsure (96): n=A,T,C or G
  unsure (108): n=A,T,C or G
  unsure (146): n=A,T,C or G
cctgggatgcangnagaaaggctgaccacaagttgagacaagatacanaaacaaacaaaaacagcagaaagtccgatcgatggtgtaagtgttgnnttcactgcttanggtgcaggtgagcttgatcgaggctcccagtaaggcanatgta

SEQ ID NO: 7027 - DNA, 537 bp, Homo sapiens
  unsure (384): n=A,T,C or G
ccaaggctatcatggatttcagattggtggaccttccccttggcttacccttttataaatggatgctacggcaagaaacttcactgacatcacacgatttgtttgacatcgacccagttgtagccagatcagtttatcacctagaagacattgtcagacagaagaaaagacttgaacaagataaatcccagaccaaagagagtctacagtatgcattagaaaccttgactatgaatggctgctcagttgaagatctaggactggatttcactctgccagggtttcccaatatcgaactgaagaaaggagggaaggatataccagtcactatccacaatttagaggagtatctaagactggttatattctgggcactaaatgaangcgtttctaggcaatttgattcgttcagagatggatttgaatcagtcttcccactcagtcatcttcagtacttctacccggaggaactgggtcagctcctttgtggcagtaaagcagacacttgggatgcaaagacactgatggaatgctgta

SEQ ID NO: 7028 - DNA, 357 bp, Homo sapiens; identical to SEQ ID NO: 138
  unsure (167): n=A,T,C or G
  unsure (168): n=A,T,C or G
  unsure (174): n=A,T,C or G
  unsure (315): n=A,T,C or G
  unsure (325): n=A,T,C or G

SEQ ID NO: 7029 - DNA, 176 bp, Homo sapiens
ccgccatctgcggtggagccgccaccaaaatgcagattttcgtgaaaacccttacggggaagaccatcaccctcgaggttgaaccctcggatacgatagaaaatgtaaaggccaagatccaggataaggaaggaattcctcctgatcagcagagactgatctttgctggcaagcag

SEQ ID NO: 7030 - DNA, 419 bp, Homo sapiens
  unsure (14): n=A,T,C or G
  unsure (15): n=A,T,C or G
tgggagccctcagnnccagcctcatcactgtgtgaccctgggtctgctcttagcctccccatggctcacgttcctgccctggatgggatgtgagtggggcccacatcgtggagctgtggtggggcctgcagtcatgaatggcaagtggtccctgatgtgcagtgtctcattagttgcactgcagttaactgtggctcctgcagggcaccctgcccagaatgcccagaagagaaccatgcatacctgcactgcatttgagagccatgagctggaggctgtggttcgtgccagcaaggagcctactgtctggtgtgctgtaggcatctggagagggagagggcctgggtaggagctgggaggaagataattttcaactatggggcttcagtactgcagcgccccgagccaggctctgtgct

SEQ ID NO: 7031 - DNA, 338 bp, Homo sapiens
ccattaggagcctcgcctggaacggggcccccacaaagctcctgagcctgggccacatcactcaggctcctgttccccatctccaggctcgcagcggacagaactccactttctgaagaaacaagaaggtaactgtatcacgtgctaacaacttaaggttctaaaatactttgcttctcacttgaagaagtcctagaacaaaagcctaaggtgaggccctcagaaatccaactggcaatgtcccggaagtacagatcccgccaaggtggggatctaagcccagggccatcaaccgcagcttggtccaaatgctctgagcagtggttttggctctgtgg

SEQ ID NO: 7032 - DNA, 374 bp, Homo sapiens
ctgctgcactgcactttgcgattcaacaagtcagggaagaaaacatcaggaagcagctaaagaagctggactgcgagagagaggagctattggttttccttttcttcttctccttgatgggcctgctgtcgtcacatctgacctcaaatagcaccacagacctgccaaaggctttccacgtttgtgcagcaatcctcgagtgtttagagaagaggaagatatcctggctggcactctttcagttgacagagagtgacctcaggctggggcggctcctcctccgtgtggccccggatcagcacaccaggctgctgctttcgctttttacagtcttctctcctacctccatgaagacgcggccatcagggaagagg

SEQ ID NO: 7033 - DNA, 191 bp, Homo sapiens
cctgccggaggcgcaagcccctcgggcggcctttggtcatgctgagctcccacacacacaccacagtgctggtcccagaggtgacaatcgttgttggggatgggcacacggcgcacagacagcggccccaggcagccaggttctcgaatgtcatcaggaccttgtcggagccgtagctccccaagcagcag

SEQ ID NO: 7034 - DNA, 430 bp, Homo sapiens
  unsure (346): n=A,T,C or G
gcaaatactgggtgcccaatatatgtcagacacagttctagatgctagggagacagtagtgaacaagtccttccctaacctaaggtagatactgttccagcttttctagaaactagtcgaattaaagttgagctacatacaaacttagcatctctgggaaagagaaaatatttgacaaaggtgaattggggccttttttaacgctcatctcttcctgtaacatctctgtttagggaaggtgggaaccctggaaaagttacataaaatgtatttattgttaaatgtgtttagtctcataagaaaagcagtctttcacttggtaatcctaatactgtccttgaactangttagtctattttaagcatggcaggctacttttggtcttgagttattttagcttaaattaactcaagctaatttaagtttacag

SEQ ID NO: 7035 - DNA, 374 bp, Homo sapiens
  unsure (78): n=A,T,C or G
  unsure (79): n=A,T,C or G
  unsure (294): n=A,T,C or G
ctgatgcctcactactagatgcagtgctgggaccttcctcttttggagctgtcccatgtacagtggacccaagctcannaccttcgtggagctgcttctccaacctgagaaactcaagacccatcctcccgctgtcactttggacaacggaaatctacattttcttttcccttttttttttttgagacagagtctcgccctgtcacccaggctggagtccagtggcacaatcttggctcactgcaacctctgcttcccgagttcaagcaattctcctgcctcagcctcctgagntagctgggattataggcatgcaccaccacacccagctattttttgtattttttactggagacagggtttcaccatgttgg

SEQ ID NO: 7036 - DNA, 264 bp, Homo sapiens
ctgagaaaaatgcaattgagggacttttctgaattgagaaaaggatgacattctttggagagcagactttctaccctctccatctatcattgaatgttatattcattgctgccactagttaaatattaggtagacattgactggtagttacaatcaatgacacagtcactggcctaattactttggtgatttttataccatggtgtctgacattcccaggtgttttgtataaggcacacgtatttcaagagctcttcagccagg

SEQ ID NO: 7037 - DNA, 418 bp, Homo sapiens
  unsure (94): n=A,T,C or G
  unsure (95): n=A,T,C or G
ctgctgttccgccaaggacagcatccttccggttgcgatggcgattgcagactccagggccccagtggtggagaaagtccagcaactgccgcanncaccctggaaaggccaggggagagcagaggacatcagtgatggggacgccgtgagacagccctgccttctgccttcctctgctgaccctgccagagctcccgagtccccaggtgccttggcagtttaccaagccctgttccagatccattcattctgagcctcgcaggccctgttccagatccattcattctgaggctcgcaagccctgttccagatccattcattctgagcctcgcaagtcctgagaggcttgcaaaggagcaggagcagcaggtggcctctgaccagtgcctgtggactcccaatcaccacctcttggtgg

SEQ ID NO: 7038 - DNA, 244 bp, Homo sapiens
  unsure (220): n=A,T,C or G
ctgccaccaggcatccacccaactgggcgctaaaggagcctggagccgggcctgtgtctgtcagcagagcaagatgtggttcattccgcagccgggcaggggccaaccctgaaccagcatgggccgggtgccaggatgctgaggctcatgggatacagcctggagaagagctgtgtccacgagtacccagttcaaggtccagcgtggttagtgtcctcanagaacatgcctgtccagagcacag

SEQ ID NO: 7039 - DNA, 290 bp, Homo sapiens
  unsure (7): n=A,T,C or G
  unsure (8): n=A,T,C or G
  unsure (34): n=A,T,C or G
  unsure (78): n=A,T,C or G
  unsure (86): n=A,T,C or G
  unsure (87): n=A,T,C or G
  unsure (89): n=A,T,C or G
  unsure (96): n=A,T,C or G
  unsure (186): n=A,T,C or G
acctaanncatggccctggctaggcgggaacggntcacagtagcgatacattcacaggacacagttggtgtccagaanagggggcnnanaacacantttctacacaagcacttggcacccacacgacagagacgtcactcaagcagcacagccacaaatagtttacagcagctcatgcccggcatncgcccatgctgggagactccctgaaaggtgggcacctgccgtctatgaggaggtgtctccctccatcattaaccccaaaccacacaatgtgtgaggagagcagg

SEQ ID NO: 7040 - DNA, 391 bp, Homo sapiens
  unsure (319): n=A,T,C or G
ctgtctcatatgtccagcaccgggcaacgttacgaatggtgtaaccaccgcctcccagcatcagcataggcaggttaaagctcttgacaaattccacacacttggcgtgtcctttgatagttagattgaagcaacctaaccgatccccagatagggagtctgagccacactgtaagaccaccgcactaggctggaacatctccattactttggacatgaccggcttgaaaatggcctcataggactcgtcatcaatcccgtctcggagcgggtagttaacagcataatacttgcctttgccagccccaatatcccgtangtccccagttcctgggaagtactctccatacttatgaaaggacacagtcatgacccggtccgtggtgtagaa

SEQ ID NO: 7041 - DNA, 340 bp, Homo sapiens; identical to SEQ ID NO: 325

SEQ ID NO: 7042 - DNA, 250 bp, Homo sapiens
  unsure (215): n=A,T,C or G
aaatatgttgctagaagtaaaagctagagccaaggaaaaaacaggtggtaaggtgcgccaaggccaaagccagaataaagaagtacttcaggagtatattgcaggtgccgacaccatcatggaagacccagccaccagggattttgtagttatgcgggccagaatgatggcagccaagttgttaggagcactttgttgctgtatttgtgatccangtgtaaatgtggtaactcaagaaattaaaccagac

SEQ ID NO: 7043 - DNA, 445 bp, Homo sapiens
  unsure (398): n=A,T,C or G
  unsure (419): n=A,T,C or G
  unsure (421): n=A,T,C or G
  unsure (432): n=A,T,C or G
cctattttgaccaaagtatacagtaaagataacgatggagatctagcatgcttactacctaaacttatggagattgatggactgcatgcaaaagatacatgaatgggatttgtggtagcagtatgcctattttgggaagcataggggctgccaagatgagaggctaccaggtaacaggccacaatgaccctgaggtttcccattctcttactgagatggggaagaaagatagtaaagaaacatttggaatggtattatatttgaaatgagaaggtacaaatgatgattttcatatccagcactcccagcaaccaaacccaaatcacctcaaactgtagaggagtgttgcagcgactagcagtagtaagagatgtgactggtgaaaacatgaggctgtntccatttcgacactcctcttntnctgggtgagangagccaggtgtgg

SEQ ID NO: 7044 - DNA, 228 bp, Homo sapiens
cctggtactgaggaataacagcatttcgtggctcagttaatatttgtacaagtgttttctcatctaggctatgcaatggaaccaccacaggcaaccgtcccacaaactcaggaatcatgccaaactcaatcagatctctggcttccacatgacgcaataaccgatctttttcttcaatgtcttggtgagtattcgattccccacttcgattagcaaggtctgcagcag

SEQ ID NO: 7045 - DNA, 188 bp, Homo sapiens
aaaggaatgtggatcatagtgatttttccttttaattttattgctcagaaatgaggcatatcctaaaaatcctggagagctgtatttaatgcatttttgcactaagtggtccttagtttaattctattgtatctgtttatttaacaaaaaattcatcataccaaaaagtgtaagtgaaaacccccttt

SEQ ID NO: 7046 - DNA, 156 bp, Homo sapiens
ctgtggcagccagcataacctccctccgtgcttccatctacctttagaatgaggggttagtaaggctgggcgcggtggttcacgcctgtagtcctagcactttgggaggctgaggtgggtggatcacttgaggtcaggagattgagatcatcctgg

SEQ ID NO: 7047 - DNA, 447 bp, Homo sapiens
ctgcaagtcatgccttgggcacctgcacttttcagagcattcagaggagaagcaatatcagggtggtccagaggtgaatccgggtgcctcagggggggaccggctcatctgtgaccgatcgaacagccaggagggtgtttccatggcaacaggacacggaagtcaccgtgtaagggtgtgtctcatccaactgcactggccgagggagtccggcatcctcatccctccttcccaatcgacctcgcgcccctttgccccaagagtacacttcgctctctgccccaatagctacagtgaaggcatccccacaggctaccattgccatcttgatgccctcaaggccttggaccttacagggtgcccgactgcctcggcgagtattggtgcccaactgtccgtgctgattgctgccaaaagtgtagcaatcacccgaggcagtcacagcag

SEQ ID NO: 7048 - DNA, 529 bp, Homo sapiens
  unsure (360): n=A,T,C or G
  unsure (377): n=A,T,C or G
ccaagaacaaggcgtgtgccacagtcacgtagtgacacaggtcacatttgctttctgccagcagaagagactggactccagtgcaggggagtgtgcaaggacaggttctggggggtggaggcatctgtggacatcccagggcaggggtgagggccagaacatccctaggtcctgagactacagtttctccacatttagatcagacattctcttccaaggaaggaaaccaagagaggctggtgaaccgtctggtaatgacaagccctcacttttgcagccctcttggctggtccctcagcaggtcttccctatgagcctgcaaaggagacaggcagggaatgagttccatgttcgagatangggaaactgagggccangggagaggcagtgactcgcccgagggcacacggcagaatgcaggcagaggcagagtggccctgggcatcctgagtccagttctgggcactctgcacctcacaggcctggactcagtccttgccaccaccactctcagagtccttctcatgga

SEQ ID NO: 7049 - DNA, 188 bp, Homo sapiens
aaagggggttttcacttacactttttggtatgatgaattttttgttaaataaacagatacaatagaattaaactaaggaccaattagtgcaaaaatgcattaaatacagctctccaggatttttaggatatgcctcatttctgagcaataaaattaaaaggaaaaatcactatgatccacattccttt

SEQ ID NO: 7050 - DNA, 310 bp, Homo sapiens; identical to SEQ ID NO: 6954

SEQ ID NO: 7051 - DNA, 301 bp, Homo sapiens
cctgtgcagagagcgccctgggctcaaaaaggccctggggcctgtgggcattctccctggtcccacacccaggatccctgggcctgtgggcactctccctggctctgtgcccccactatggaggcagagcccgaatcagcaagtcagtcttcggcagcaggagtgacgggctgtctggatgtgggggtgcaggcacttcctcccacactcagaacttaactttcttctaaggagtccagcccagctctacattcttttgactcccaaagtggcttacagatgccctggtgttttttttttt

SEQ ID NO: 7052 - DNA, 79 bp, Homo sapiens; identical to SEQ ID NO: 139

SEQ ID NO: 7053 - DNA, 289 bp, Homo sapiens
ctgtgttaccctgggcaagccctcacctttctgtgcctgtcccctctttgctgtaaaatgggggtactaatacttaagtcttcccttcccccacagttgctactaacaaacagaaaaacggtacccatgtgctccagggtcacctctgacctttttttcctccagatgtccagctcgccgctgtccaagaaacgtcgcgtgtccgggcctgatccaaagccgggttctaactgctcccctgcccagtccgtgttgtccgaagtgccctcggtgccaaccaacggaatgg

SEQ ID NO: 7054 - DNA, 326 bp, Homo sapiens
ccacgttgtgccccgagatgagatccggaagctgatggaaagccaagacatcttcaccgggactcagactgagctgattgctggaggccagctcctttcctgcctctcacctcagcctgctccaggggtggacaatgtcccagaaggaagcctgccagtgcacggtgaacaggcgctgcccaaggaccagcaaatcactgccttggggagagaggaacctgtggcaatagagagccccggacaggatcttctgggagaaagcaggtctgaaccagtggatgtgaagccatttgcttcctgcgaagattctgaagctccagtcccag

SEQ ID NO: 7055 - DNA, 177 bp, Homo sapiens
ctggcttcttgatgtcctggaagagagcgcggccgccacgctggttttgcatcttcaggagacgctcgtagccctcgcgcttctcctcggccagttcgcggaagaagtggctcacgccttccagagccacatcatcgcggtcgaaatagaagcccagagagaggtaggtgtaggagg

SEQ ID NO: 7056 - DNA, 227 bp, Homo sapiens
cacaaacagtccagcatgacggtgatggaagctcaggagagcccgctcttcaacaacgtcaagctacagcgaaagcttcctgtggagtcgatccagattgtattagaggaactgaggaagaaagggaacctcgagtggttggataagagcaagtccagcttcctgatcatgtggcggaggccagaagaatgggggaaactcatctatcagtgggtttccaggagtgg

SEQ ID NO: 7057 - DNA, 539 bp, Homo sapiens
  unsure (418): n=A,T,C or G
  unsure (425): n=A,T,C or G
ctgccaacctgagtgagttgtgccgcagttgtgagcaccccttggctgaccacgtatcccacttggagaatgtgtcagaggatgagataaaccgactgctggggatggtggtggatgtggagaatctcttcatgtctgttcacaaggaagaggacacagacaccaagcaggtctatttctacctcttcaagctactgcggaaatgcatcctgcagatgacccggcctgtggtggaggggtccctgggcagccctccatttgagaaacctaatattgagcagggtgtgctgaactttgtgcagtacaagtttagtcacctggctccccgggagcggcagacgatgttcgagctctcaaagatgttcttgctctgccttaactactggaagcttgagacacctgcccagtttcggcagangtctcangctgaggacgtggctacctacaaggtcaattacaccagatggctctgttactgccacgtgccccagagctgtgatagcctcccccgctacgaaaccactcatgtctttgggcga

SEQ ID NO: 7058 - DNA, 235 bp, Homo sapiens
ccacacggtcacacaaggcttccgcctcagccaggttatgggtggtcaggaggacacctctctctgtgtttttaacgactgcctggattgcctgccacatttgctgctgccctgtggggtctatgcccgtagatggttcatccaggagcaagacaggtgagtttcccaggaggctcagcacaaaacacaactttctcgtgattcctgctgttaatttctgcacaggaacattcag

SEQ ID NO: 7059 - DNA, 518 bp, Homo sapiens
  unsure (473): n=A,T,C or G
  unsure (506): n=A,T,C or G
ccagaacgtgaaccactggacaggatatagctgttccagcttagggagcccactcgggcagagtgactggtcatatttcgaagccgtttctgctgctgcacatcccatagctgcacctcagcactgctggtgcccacagccaagtagttgccctctttgatccaggccacagaggatatatattccccaggctgctccatttgcaaaagctgcaggatgtcaccagagcttgcactccacaggtacacactgttgtccagtgccacggccagtacattcccagaactccaatccacaaggttcaggtaatagtcatttcggatttcaggcgcatccaggatacggtctggcagggaaggaatgtaacggcaggtcttccggctggagccaggagtggccttttggctgtagagtactttcagtctgttctgataaccctctggcgcattttgtggttttccactgagccgaangatcttggcttcctctacatcaaaaccgttcangttcaaagccca

SEQ ID NO: 7060 - DNA, 367 bp, Homo sapiens
ccattatctacatgtgttttcagcacctggttggttctaaatgggatctggagacccagcttcttggagatttttaagaggaagtattaactggacaaatggaatgggcaccagaaagaaatacagggtcacccagaatggcagaaacctaggtttcccagagtggaaagagagaggagacattcaacaaacaagtatttattgagcgcctactatgtgccaggcactgttctagacccccccccagaagaaaaaacaaaaaacaagatagaggcagcaaacacaaattctgagggagaggaaaggggcagttgagtaagacggctaagggaactgagaagcctgaggtgatgggggctctgcctta

SEQ ID NO: 7061 - DNA, 196 bp, Homo sapiens
ctggggctcaaactgctgccagtgctggtgagtgatccccacatcggtgcgtagccccagggccaaaacttcctccagcagctccagcctgcccagggggacacgcttccgggtgccatgtccatcaagggcttctggaccccgaaggccgtgatgaagatgttgactaccacgatgatgaacaccaggcccgtgg

SEQ ID NO: 7062 - DNA, 373 bp, Homo sapiens; identical to SEQ ID NO: 141

SEQ ID NO: 7063 - DNA, 373 bp, Homo sapiens; identical to SEQ ID NO: 142

SEQ ID NO: 7064 - DNA, 185 bp, Homo sapiens
cctctacttaccaccaggtacagcatgaggcacggctgtctatgatgttgctggacagcagagctgacgacgggttccacctgctgttgatgactcccaaacccatgatccgggcttttgaccatgtcctgcatctccgtccactgagtcgcctgcaggcagcgtgccaccggctgaagctctgg

SEQ ID NO: 7065 - DNA, 246 bp, Homo sapiens
ccttaccacaatcactttgccaccatcaccttacctttgcaaacaagccaggccaaaaaggctcaacatttacaccggctgctttaatgagggcattgatcttatcctccgtgactgtcacctcatcgtcgtgcagaatgagggccgagtagatgcaggcgagctcggagacagaggccatggcgcgggcgagtgtagggctggcgctgccggacgcggtgctagtcgccggatgaagtgagggcc

SEQ ID NO: 7066 - DNA, 210 bp, Homo sapiens
cgcagcttcttggcttaggtacttctactcacagcggccgattccgaggccaactccagcaatggcttttgcaaatctgcggaaagtgctcatcagtgacagcctggacccttgctgccggaagatcttgcaagatggagggctgcaggtggtggaaaagcagaaccttagcaaagaggagctgatagcggagctgcaggactgtgaagg

SEQ ID NO: 7067 - DNA, 240 bp, Homo sapiens; identical to SEQ ID NO: 326

SEQ ID NO: 7068 - DNA, 132 bp, Homo sapiens
ctgcagagatatcaatgggaacagaggtttcagaagaagatatttgcaatattctgcatctttgcacccaggtgattgaaatctctgaatatcgaacccagctctatgaatatctacaaaatcgaatgatgg

SEQ ID NO: 7069 - DNA, 239 bp, Homo sapiens; identical to SEQ ID NO: 140
  unsure (80): n=A,T,C or G
  unsure (81): n=A,T,C or G
  unsure (92): n=A,T,C or G
  unsure (93): n=A,T,C or G
  unsure (113): n=A,T,C or G
  unsure (114): n=A,T,C or G
  unsure (126): n=A,T,C or G
  unsure (127): n=A,T,C or G
  unsure (142): n=A,T,C or G
  unsure (143): n=A,T,C or G
  unsure (183): n=A,T,C or G
  unsure (196): n=A,T,C or G
  unsure (201): n=A,T,C or G

SEQ ID NO: 7070 - DNA, 321 bp, Homo sapiens
ctgggtaaggcatgctttgagggaagactccaccagcccggccaggaaagggcagcaggcgcagtgcccctatggggcccacatgactggtaacagcagcaggacacctcttccaaagctgtccaccagccccactaggggctcctactcatggcaaaaaagactacatgagcccacaactgtcaactaacacagtgccacctcctcccaaagcaaacacatatacatacaatgttaagaacctattatcagaacagcagtgcagcagaccctggccttggtctctgaaagtcctgtgtcactggctgtaaggacgcttgg

SEQ ID NO: 7071 - DNA, 237 bp, Homo sapiens
aaagttgagaggcagttcacatcctaagtgatacctagaaacctgccttcttgttcgcaaatgatcaacatgaacatacagaatggctgacatttggacctttggataagcttaaaacatggattgtggaatgtctaatagagggcttttctctcttttttttaataatgactgtcccacactttaattcctcaatgatatgtggatgctaactaaatcagatgaaatgttttcttt

SEQ ID NO: 7072 - DNA, 368 bp, Homo sapiens
ctgtcatcttttgaaacggagttcaacacacagccgcatcgtaaggtagaaggaaacttcaacccttttgcctctccccaaaagaaccgacaatcagatgaaaacaacttaaaagaccctgggggctccgagttcgactcgatcagcaaaaacacatgggctcctgctcctgacacatgggctcctgctcctgaccaaactgagcaagaccagaatagactgtcacagaactctgtaaatctgtctcccagcagtcacgcaaacaacttatcagtagtgacttacagtaaggggctccatgggccttaccccttcggccagtcttaaacgggtgtcagcaagaagaaaaattaacaaaagacagaagg

SEQ ID NO: 7073 - DNA, 378 bp, Homo sapiens
ctgaggtctcttgagggagcttagccaatgtgggagcagcggtttggggagcagagacactaacgacctcagggcagggctctgatattccatgaatgtatcaggaaatatatatgtgtgtgtatgtttgcacacttgtgtgtgggctgtgagtgtaagtgtgagtaagagctggtgtctgattgttaagtctaaatatttccttaaactgtgtggactgtgatgccacacagagtggtctttctggagaggttataggtcactcctggggcctcttgggtcccccacgtgacagtgcctgggaatgtattattctgcagcatgacctgtgaccagcactgtctcagtttcactttcacatagatgtccctttcttgg

SEQ ID NO: 7074 - DNA, 353 bp, Homo sapiens; identical to SEQ ID NO: 327

SEQ ID NO: 7075 - DNA, 267 bp, Homo sapiens; identical to SEQ ID NO: 143

SEQ ID NO: 7076 - DNA, 264 bp, Homo sapiens
cagagatctattaatgagatgaagcggttggaagaaatgtcaaatatgtttcagagctctggagtccagcaccaccctccagaaccaaaagcccaaacagaagggaatgaagattcagagggcaaagagcaaccttgggaaatggtgatggataagaaacactttaagctgtggcggcgcccaattacaggcacccacctttaccagtaccgagtttttggaacctacacagatgtgacacctcggcagttcttcaatgttcag

SEQ ID NO: 7077 - DNA, 353 bp, Homo sapiens; identical to SEQ ID NO: 327

SEQ ID NO: 7078 - DNA, 181 bp, Homo sapiens
  unsure (20): n=A,T,C or G
  unsure (27): n=A,T,C or G
  unsure (28): n=A,T,C or G
  unsure (43): n=A,T,C or G
gttgactcatacaccctcantgtcagnngccccaggaaagacngccaagattacctgtgggggaaacaatattgggagtaacaatgtacactggtattaccagaggccaggccaggcccctgtcctaatcatctcttttgataacgaccggtcctcagggatatctgaggcgattctctgg

SEQ ID NO: 7079 - DNA, 473 bp, Homo sapiens
gttcggggagagggtggtagcacagggcttgggatatcggcagtgtgggaaatgcgaagcatttctcatcatcatcatctctgctacagtcatgtttctgcatgtcagcgagcgacactgtccctgcctcaggttggaggttttatcagccaaagtgtttttttcatgtatcgttcgttccattcatccactctgtgccttgtcagcctttgaaaggcttggttgctcccaggctgctgttctcagggaccttaaaagggacctggttagtcttggggcagagagtatctacttgggcactctcttccaagaaagaccttgtctccattttcattagacaatgcttcttgtgtgtgttctggaagatcttctaaatggaatgcttgttgcactgttcccaggcgagtggctgccatgagacctgaggaccacacttgggggaccaatcatgtccttcaccactgtgccttaga

SEQ ID NO: 7080 - DNA, 497 bp, Homo sapiens; identical to SEQ ID NO: 638
  unsure (20): n=A,T,C or G
  unsure (90): n=A,T,C or G
  unsure (149): n=A,T,C or G
  unsure (196): n=A,T,C or G
  unsure (197): n=A,T,C or G
  unsure (203): n=A,T,C or G
  unsure (396): n=A,T,C or G
  unsure (402): n=A,T,C or G
  unsure (411): n=A,T,C or G
  unsure (427): n=A,T,C or G
  unsure (454): n=A,T,C or G
  unsure (458): n=A,T,C or G
  unsure (466): n=A,T,C or G

SEQ ID NO: 7081 - DNA, 566 bp, Homo sapiens
  unsure (405): n=A,T,C or G
aaatgattctttatttcaataaactttaacaaacaatatataatatttcttccttaaaaagctcattcaaagatcataggcagacttcttccccattgtattttagttggggagataaaggcaaaaagaggaaatgtaagctatcttacagtcattctgagaacctctggtttcatgctatactttcccagctaaaagttactaatttacgaagttcagatactgaaacttaaaaatcaagatccatatattaggatgtcctgctgtcacactggtggtggcccattgtgtcggagtctggtaaatggacctgcccgggcggccgctcgggcaggtctgagaatatcatatggtactaacaaaggaaaaaactatactgaagaagaagatcgttttctgatttgnatgcttcacaaacttggatttgacaaagaaaatgtttatgatgaattgcgacagtgtattcgcaactctcctcagttcagatttgactggtttcttaagtccagaactgcaatggagctccagaggagatgtaataccttaattactttgattgaaagaga

SEQ ID NO: 7082 - DNA, 283 bp, Homo sapiens
atggcgtcctccacataggcagtggctgtggtttctaccccgggtggccgggggcagtgctgagctgggactgttgtttgcccagcctgggctgcagaaagcagcagttaaagttcgtttctggtcactgctccaggaagccaccttactctgagggtcaagaattgccgcttccttttagttactgtaagttcctcctctgcccctggtttgtttcccgcggcacttctggatacccccaggtcccagacccttccagactcaaaccatgaactttcggcag

SEQ ID NO: 7083 - DNA, 259 bp, Homo sapiens
  unsure (111): n=A,T,C or G
  unsure (112): n=A,T,C or G
ctgccacctgtgaccaagggctcccagcccccacggttctgcttccagtccaagagctggaagaggtgtgtgccagtgaccctggagctgaccaaggtgtggaggcaggcnnaccagaccttcatctctctactgcaggccgtgaggctaggcaggtgggctctgccctgacagtccagccccaacaggtgttcagatgaggtgacccgccagctccaggccacagcttcccacaaggtggggcgagatgggattgtgg

SEQ ID NO: 7084 - DNA, 158 bp, Homo sapiens
aaaggcaaatattatccagcaagcagtctaccctgtcctttgcaattgctcttctccacgtctttcctgctacaagtgttttagatgttactaccttattttccccgaattctatttttgtccttgcagacagaatataaaaactcctgggcttaagg

SEQ ID NO: 7085 - DNA, 143 bp, Homo sapiens
gggatatgaggtcagaagggtagcaggagggcaggtcttgttcagccatggtaaagggtttggcttgactcctggtgaaatgaaaagtcttgggtgtgggggcggtttaagcagagaaatgataggatctgatgtatattttt

SEQ ID NO: 7086 - DNA, 428 bp, Homo sapiens
cttctctattaccctccttaccaccacagctccagccaagcttggagtgatctgcaaacccaatatgtgagtttagtgtatagaaaacacatgaatgaaaggcaaaaggggccaacattggtatttgggttttttttttttttgagctgtcactaggctcctgaccttccctctgaactccaccctgcagggcaggccaacagacaagctttctttctttctttttcttttttttatatgagatggagactcgctctctcgcccaggctgcaatgcagtagcacgatctccgctcactgtaacctccccctcctgggttcaagcgattcttctgcctcagcctcccgagtagctgggattacaggtgcacaccaccacatccggttaatttttgtatttttagtagagacggggttttgccatgttgg

SEQ ID NO: 7087 - DNA, 287 bp, Homo sapiens
ctgtatgcccatggacaaataaccattctgacctcagcttcatcctctgtaaatgagtctaattcaagaagcataagtctactgatgactagcgatggcatctccaccagcctcagccctcaaaaatgcaaccaggaaataagattaccttgactgcatcagggaccaaacaaaacttcccctggggaccgaagaaagatcagccctttttggaaacatacaggatatctaccacttcaatagtgaacttctgcaagatttggaaaactgtgaaaatgatcctgtgg

SEQ ID NO: 7088 - DNA, 228 bp, Homo sapiens
ctgccactgaagcccagcctgttgcaatctggggaattagcaggctgggggttgcccatcagtgtcttctgagtgcccggtgtgccctgtcaaggtgtctggtcggagagcagggtggagaagtactttctctgtggcccggtgcagtggctcacgcttgtaatcccagcactttgggaggctgaggtgggtggatcacctgaggtcaagagtttgagaccagcctgg

SEQ ID NO: 7089 - DNA, 166 bp, Homo sapiens
  unsure (13): n=A,T,C or G
  unsure (14): n=A,T,C or G
  unsure (141): n=A,T,C or G
ccttaaaaattanngcacgaccaaaaagaatgatttggtgagagatgtgtagctgattgacaattttagtgtgaattcatattcatttaacccagcagcaatctacataagctatgctttttcccgcctgtatttatgttncttagcttataaagtcccaatatat

SEQ ID NO: 7090 - DNA, 331 bp, Homo sapiens
  unsure (13): n=A,T,C or G
aaatagaaaacantatattgaaagtggtgggtttgatctttttatttagaaacccacaaaatcagaaacacagtacaaataaaacagaaatcaaactataagttgacttttagttcctaaaaagaaacatatttcaaaagcaatggaatctagaattcttataacatgaataacaaaatgtacagcaagcctatgtagttcaattaatatataaggaaaaggaaggtctttcttcatgatacaagcattataaagttttactgtagtagtcaattaatggatatttccttgttaataaaattttgtgccataatttacaaattagttcttt

SEQ ID NO: 7091 - DNA, 516 bp, Homo sapiens
  unsure (498): n=A,T,C or G
aaatgtatagggtattaaatacaagcttctaaaattttcagtatctatattggctttctctaacagctctacagcaaagtttgacatgttttttgtgtgtgtcatgtattgtaagttgtaatatctgtaggagtgagttggacattctaaattagcagtaaaaaattcacaattacagctcagcttgtttattcattatagtttccacatttccaacttccaagtgaactttatatatactacagtgaattatagataaatacagccatggtggacctttccctcaatagtgattttttgtacaaacagtataattaaaaggaaaagcttttatattttatgcaaggtaaatgtttcctaaatgtcacaaaagtgatagaaaacatagctttttgggatctggtccagcattagagtttctaattctgagacccaccagcttgtgtttcatcttctttatatcctgtcagaatacatacttaaatcatgtgggtatgngaaagatgttgtttaact

SEQ ID NO: 7092 - DNA, 402 bp, Homo sapiens
  unsure (15): n=A,T,C or G
  unsure (25): n=A,T,C or G
  unsure (119): n=A,T,C or G
  unsure (120): n=A,T,C or G
  unsure (231): n=A,T,C or G
  unsure (346): n=A,T,C or G
  unsure (364): n=A,T,C or G
  unsure (387): n=A,T,C or G
aaaaatgttttcccncgggtaattntctattatatattttcatatgggcaaagggaaaaaatgataaatcctctgtaatcacaaaccccaatttcgttttgtttattcagcttctaaannattgaacacccagacttttaattcaacctttaagaaccttatcatttatgtttcagtagatatcaaagtaatccatgtttgtgtcaaatgatcatagaaaataaatagaanagacagtgaagcaagtaaaaagaaaagcattgttttaatttgtttgcattaatttttttcatttgtcaaaatgcttcttttgtttgccacagtaaagaacagtttttattgtttngtaagtaaaattacgtancttgattttgtatgtaaagattnatttccataataaaa

SEQ ID NO: 7093 - DNA, 418 bp, Homo sapiens
  unsure (15): n=A,T,C or G
  unsure (16): n=A,T,C or G
ccattacatcctctnnttaatttacataatacagatacttgagaaagttgttgtggtgttgtatgccaagaaaattctttttattggtgcctatattgtaacaattatttttaatgcattgtattttgaagtaacggttcagttaaatttttcacctgctgtgtaactgaaacacaattacagtttataatcatctgtagaagtctggagataattttgcaactcatgttatgggttaaatgaatatttttgtaaaagtaaaagcaacaaatttataaattgattatttgaaactttacaacacaattgcatcccaaatacaaattgtattgcttattcattatagctattcgtcctgtaatctgtttctaggtgaagcatactccagtgttttaggggtttttgaaaataaatattt

SEQ ID NO: 7094 - DNA, 357 bp, Homo sapiens; identical to SEQ ID NO: 6074

SEQ ID NO: 7095 - DNA, 226 bp, Homo sapiens
  unsure (15): n=A,T,C or G
  unsure (17): n=A,T,C or G
  unsure (32): n=A,T,C or G
aaataacaaactatncncataaaaaggagcanaaataatatggaatgtttttgacgaaaacaaacttatggattcaataaataatataaaatgcctttgtgctaaaatagaactcttgtttcttatatatatatagttcagtgatctttatgctatccagaaaaagccagatctattataattaaacatagaaaaataccatttaacaataaaactaaaaaaatgg

SEQ ID NO: 7096 - DNA, 254 bp, Homo sapiens
  unsure (14): n=A,T,C or G
  unsure (15): n=A,T,C or G
aaaatatcttttannggttttatataaaaatgtctgagtatgattttgtgtgaaagttctgataccagttgtaatagagtcaaatttatgtgagcaataaagaagaaattggcagatattggaaaaatattttgtgaaaagctgtatttattataaatactagggccatgacatagtaccattggggttaagtcattttcccaatctatttataatttaatgatatgttagtgcctctgttatatgtcaagttt

SEQ ID NO: 7097 - DNA, 378 bp, Homo sapiens
aaagtatttacccacagaactcataaaaaggtcaatttggtaaaaggacgttttgacccaagagcatctaatatttaagcttattttattggataagcatatctcttgtccatcacaagttatagaaaagttatatacgactaaaagaaaaagttatctactgtaattataggaagttgtcacaacaggaattcagctcaagaacttcttgcaattactgctacaacgtctataaatgggaaaagcaagcattaaaatagattaataaaatataaaattaagactggaaaattccagagacaagctgtatccttagaagaataaatagttaaaattattcagtaagctgacgtatttaaccattactgggcctgtaaa

SEQ ID NO: 7098 - DNA, 120 bp, Homo sapiens
  unsure (16): n=A,T,C or G
  unsure (80): n=A,T,C or G
  unsure (81): n=A,T,C or G
  unsure (90): n=A,T,C or G
  unsure (91): n=A,T,C or G
  unsure (108): n=A,T,C or G
aaaatgtgtccctccnttgggagagaatcattttgttctttactaacaataatttgaaaattggtaatttaatatcttgnnaatatgaanntattatggtatagattngcttctaggaga

SEQ ID NO: 7099 - DNA, 397 bp, Homo sapiens
aaatctataatctggttcaagtgcaaatcaggtgctttctgttagtccttccaaaaaaggcatttttaatatttttggcacaaatgaaatgtcatcatgccaacaattctaattacaatacatatatccaaacctttagagtagcaatcatatacatacagtataaaactgagtatttacaaatgtattcagcataaatgtaaccttcgtgggtgaatcagaactcattagccatacccacactaataataattataaaaggtaaatacaattcctttctttcatttgcttatgctggttgttgtgggttgacattcatgtgaggaggatgtcctagaagaccaattctttgtttctgcttcctttgttctgtcatctgatcctttaattccgacag

SEQ ID NO: 7100 - DNA, 421 bp, Homo sapiens
ccaaaatgatggatcctagggttcttcatcacatgggtggtatggcaggacttcagtcaatgatgaggcagtttcaacagggtgctgctggcaacatgaaaggcatgatgggattcaataatatgtaaagaaaatgccttaatataaactgactcagttgaatacctaatttgctgagacctcagcgtttcccttctttttgcgaattggggggaaagtgtatttttcttgcttatcatgcactctttccttttcttctcgcccgcttttcccctccttttctttttccttccttctttcctccctttaatataagggagaaatacatggtttttgtggaaatcattatatgtttgctttagattttcttctgttttcaccatcataacacttaagtttaaatcatgatgtaaaattttag

SEQ ID NO: 7101 - DNA, 556 bp, Homo sapiens
  unsure (543): n=A,T,C or G
ccttttatctacttctttgcatgtaaagggtataagagaaaggttatgaggatgctgaaacggcaagtcagtgtatcgatttctagtgctgtgaagtcagcccctgaagaaaattcacgtgaaatgacagaaacgcagatgatgatacattccaagtcttcaaatggaaagtgaaatggattgtattttggtttatagtgacgtaaactgtatgacaaactttgcaggacttcccttataaagcaaaataattgttcagcttccaattagtattcttttatatttctttcattgggcactttcccatctccaactcggaagtaagcccaagagaacaacataaagcaaacaacataaagcacaataaaaatgcaaataaatatttcatttttatttgtaaacgaatacaccaaaaggaggcgctcttaataactcccaatgtaaaaagttttgttttaataaaaaaatttaattattatttcttgccaacaaaatggctagaaaggactgaatagattatatattgccagatgttaatactgnaaacatacttttt

SEQ ID NO: 7102 - DNA, 388 bp, Homo sapiens
  unsure (14): n=A,T,C or G
  unsure (15): n=A,T,C or G
ctgaagtgtggctnncataaataactgtttattccaaaatatttacatagttactatcagtagttattagactctaaaattggcatatttgaggaccatagtttcttgttaacatatggataactatttctaatatgaaatatgcttatattggctataagcacttggaattgtactgggttttctgtaaagttttagaaactagctacataagtactttgatactgctcatgctgacttaaaacactagcagtaaaacgctgtaaactgtaacattaaattgaatgaccattacttttattaatgatctttcttaaatattctatattttaatggatctactgacattagcactttgtacagtacaaaataaagtctacatttgttt

SEQ ID NO: 7103 - DNA, 239 bp, Homo sapiens
  unsure (13): n=A,T,C or G
  unsure (15): n=A,T,C or G
  unsure (16): n=A,T,C or G
  unsure (29): n=A,T,C or G
  unsure (80): n=A,T,C or G
  unsure (118): n=A,T,C or G
  unsure (125): n=A,T,C or G
  unsure (168): n=A,T,C or G
  unsure (182): n=A,T,C or G
  unsure (223): n=A,T,C or G
ctttttttttttntnnttttttttttttngagtattgttttattaaccaaaacacaaaaccaaaatgaaaactggcttanaatataaaattctcatttttcaaagtgaaagtttgaanatactanctaaagttgataacttaaatagtggtaaaagtaaataacttanaattatggcagcantcacaagaagaaacagaaaacagggggactagggattcggnggtagacttttacttt

SEQ ID NO: 7104 - DNA, 394 bp, Homo sapiens
aaataactttcttaaccccgcccattaagatcacagtaaacatacaataatttttattatggaaattaatctttacatacaaaatcagctacgtaattttacttacaaaacaataaaaactgttctttactgtggcaacaaaagaagcattttgacaaatgaaaaaaattaatgcaaacaaattaaaacaatgcttttctttttacttgcttcactgtctcttctatttattttccatgatcatttgacacaaacatggattactttgatatctactgaaacataaatgataaggttcttaaaggtttgaattaaaaagtctgggtgttcaatattttagaagctgaataaacaaaacgaaattggggtttgtgattacagaggatttatcatt

SEQ ID NO: 7105 - DNA, 332 bp, Homo sapiens
  unsure (14): n=A,T,C or G
  unsure (15): n=A,T,C or G
aaatagaaaacagnntattgaaagtggtgggtttgatctttttatttagaaacccacaaaatcagaaacacagtacaaataaaacagaaatcaaactataagttgacctttagttcctaaaaagaaacatatttcaaaagcaatggaatctagaattcttataacatgaataacaaaatgtacagcaagcctatgtagttcaattaatatataaggaaaaggaaggtctttcttcatgatacaagcattataaagtttttactgtagtagtcaattaatggatatttccttgttaataaaattttgtgtcataatttacaaattagttcttt

SEQ ID NO: 7106 - DNA, 408 bp, Homo sapiens
ctgtgcaagaaaaattaaatgaaatagtagatcagataaaaactagaagagaagaagaaaagaaacaaaaagaaaaagaagcagaagaagctgaaaagcaattattccatggtactccagttacaattgagaatttcttaaattggaaagccaagtttgatgcagaactcttggaaattaaaaagaaaaggatgaaagaagaagaacaagcaggaaaaaataaattaagtgggaaacaactatttgaaacagatcataatcttgacacatctgatatccagttcttggaggatgctggaaacaacgtggaggtagatgagtctttgttccaagaaatggatgacttggagctggaggatgatgaagatgatccagactataatcctgctgacccagagagtgactcag

SEQ ID NO: 7107 - DNA, 519 bp, Homo sapiens
aaaaaaagaaaaataaaataaagtgttttgattatttagggctgacttacatttcagtatgtgacaaaaattcaaacccaaatgcatctagctcactcagtttcagacaggtcctatgttcagcccctaaacgaatggcacaatgccaccaattttgggattcctgagtttggttcccttaagttctcagagttttcccaactctcaaaaccaaagcatcatgggagtgacagggccactggcaagactttttgccagtcagcctagttcttcttttaagatgcagtagtctcaaagcttaaagtcagaaaatcttgcaatacaagagtaactgcaagaacatataaagaaggaaaagaaaggacggggtttctagttgctaagatttgccaaacatggctacaaaactggtaaacaaacctttcttgagtgcaaagtccattagcccaacttgccatgaagagatttgaaataaaaatgaacaaatcaatttctgttgtagatacaaagcgaaaaaat

SEQ ID NO: 7108 - DNA, 485 bp, Homo sapiens
aaatgcattcttcacaagtaattcagcatatatttttatatcatgtttacttatgcttaagaattaaagcaagtatatttattactctgatggaaatatgggaaatctctcattcatgcaatatacagggataatattcaagcgaagggaaaattcccgctttttatttttgtaaatgtatccatatataatcatcgacatgacagatgaggaaacccatgaagtttcccactagtcagatatacattttcacttcatcagaagcacctgatatctacagctaatttataattagatactgtttcaatgaaaccaaaatgagccctacaagttcctataaacaaaagcttccaatgtactaggacagtcagtaattaatgcatcattcagaggattatggctgttccttaagaagtgcaagttcaaacctgtcaacaccagaggtaatcattttatattaatttatacgtaataccatttacctg

SEQ ID NO: 7109 - DNA, 452 bp, Homo sapiens
  unsure (420): n=A,T,C or G
aaaaatgttttcccgtgggtaattttctattatatattttcatatgggcaaagggaaaaaatgataaatcctctgtaatcacaaaccccaatttcgttttgtttattcagcttctaaaatattgaacacccagacttttaattcaacctttaagaaccttatcatttatgtttcagtagatatcaaagtaatccatgtttgtgtcaaatgatcatagaaaataaatagaagagacagtgaagcaagtaaaaagaaaagcattgttttaatttgtttgcattaatttttttcatttgtcaaaatgcttcttttgttgccacagtaaagaacagtttttattgttttgtaagtaaaattacgtagctgattttgtatgtaaagattaatttccataataaaaattattgtatgttttactgngatcttaatgggcagggttaagaaagttattt

SEQ ID NO: 7110 - DNA, 500 bp, Homo sapiens
  unsure (375): n=A,T,C or G
  unsure (493): n=A,T,C or G
cccaacttgcccttcaagttctacttcagtttgataaggctataaatgcagcactggctcagagggtcaggaacagagtcaatttcaggggctctctaaatacgtacagattctgcgataatgtgtggacttttgtactgaatgatgttgaattcagagaggtgacagaacttattaaagtggataaagtgaaaattgtagcctgtgatggtaaaaatactggctccaatactacagaatgaatagaaaaaatatgacttttttacaccatcttctgttattcattgcttttgaagagaagcatagaagagactttttatttattctagaattgcagaaatgactacactgtgctataccagagaattccagtanaaagaaacttgtaactctgtaggcctcttacatcacctttattatacagcatgaaaaaccataacttttttttaaggacaaaagttgttgccttcctaaagaaccttctttaataaantcatttt

SEQ ID NO: 7111 - DNA, 509 bp, Homo sapiens
aaataaataaatagctagactggtgactgattcttcagcaaaaatattttatgatccagcagattattcactgatttgacatagtctggctgtacccaggaatggagcctgcacggtgaatggctttgtatagaacctctttgtctacaccattatgtgcgctgataagcgttcatggaacgcgttgaaattgtaattatatctgaggaattctgtatagattagaattctgtatagattagagagtgttgaaacggatgatttctatgctgagtttgtgctggtgtatgtgtgaagtgagtgagttgggtgtattgtgcgctaaacttttctgatagaggaagcctgattaaagaatggtccgtgctaaggacttgttagatctagttcactctccatttaataattatatgctatttctatattttcattctcctatcacctgtcttgcctttttcattatttttattatgaaacttgtgtaaatacaatttttgtttctgtacttt

SEQ ID NO: 7112 - DNA, 328 bp, Homo sapiens
aatatggatcagagcatttattttggggaggaaaacagtggtgattaccggcattttattaaacttaaaactttgtagaaagcaaacaaaattgttcttgggagaaaatcaacttttagattaaaaaaattttaagtatctaggagtatttaaatccttttcccataaataaaagtacagttttcttggtggcagaatgaaaatcagcaacttctagcatatagactatataatcagattgacagcatatagaatatattatcagacaagatgaggaggtacaaaagttactattgctcataatgacttacaggctaaaattagtttt

SEQ ID NO: 7113 - DNA, 280 bp, Homo sapiens
gtacaaaactttttatatcaaaaggctttgcacatttctatatgagtgggtttactggtaaattatgttattttttacaactaattttgtactctcagaatgtttgtcatatgcttcttgcaatgcatattttttaatctcaaacgtttcaataaaaccatttttcagatataaagagaattacttcaaattgagtaattcagaaaaactcaagatttaagttaaaaagtggttttggacttgggaacaggactttataccttcttttactgtaacaagt

SEQ ID NO: 7114 - DNA, 244 bp, Homo sapiens
  unsure (15): n=A,T,C or G
  unsure (16): n=A,T,C or G
tgcactcaaagcttnntaagatagttaagcgtgcataagttaacttccaatttacatactctgcttagaatttgggggaaaatttagaaatataattgacaggattattggaaatttgttataatgaatgaaacattttgtcatataagattcatatttacttcttatacatttgataaagtaaggcatggttgtggttaatctggtttatttttgttccacaagttaaataaatcataaaact

SEQ ID NO: 7115 - DNA, 484 bp, Homo sapiens
  unsure (342): n=A,T,C or G
aaattgttctcaaaattagggaaataaaagagaatgaaattgtggcaacttttttccctcctagttaccagatgtatgctactcatggtgggtcctggcttccctaaagataattggaagacttcattggattgatagagagaaactgcgtaatttcattttagcatgtcaagatgaagaaacggggggatttgcagacaggccaggagatatggcaagtaatatttctgacatatttctataaattatttcagcgtttgcattacttcatggttccatggatttccagggtggcattccgagtgttgctttgaaagcagtttttttttctatttattgtanagtgtatgaaggatatagaacaatcttacagaaatttcttgtcgcttgttgctaacaaaattagtatatggtaaaggtcaggtattcataatttgaagttaaagaagttttcattttgtgatctgtatataaattctttttt

SEQ ID NO: 7116 - DNA, 292 bp, Homo sapiens
caggtaaagtaattcgtttaataatagatgtgtttttagaggaaatgctgttacttggaattaattttccagttatacagtcttctataacttactaataatattctatatgtactttatgtaatttccctaaaaagaatgaactaccactacactatggtgttaaaccaaaatatagggaaaataaacactaactgctgcttatggataatgttgcaactacttgttatgcatataaatattttactttttcacatgtatagattgcatttcttaggtgttttaatttttt

SEQ ID NO: 7117 - DNA, 352 bp, Homo sapiens
ctgtaaggaggcggcagacggctaccagtgctgtatgatggcgcagtacaaccggcacgacagccccgaagatgtgaagcgacgagccatggccgaccctgaggtgcagcagatcatgagtgacccagtcatgcgccttatcctggaacagatgcagaaggacccccaggcactcagcgaacacttaaagaatcctgtaatagcacagaagatccagaagctgatggatgtgggtctgattgcaattcggtgatgacttgttcatccccccttcccttcgccctcatgtggaaagaggagctgggaccgcggcgagcagcacggagcggaagggagagcaggggagagaagg

SEQ ID NO: 7118 - DNA, 237 bp, Homo sapiens
  unsure (15): n=A,T,C or G
  unsure (40): n=A,T,C or G
  unsure (41): n=A,T,C or G
  unsure (210): n=A,T,C or G
  unsure (220): n=A,T,C or G
aaaaaattaactacnaaaagcttttatatttaagaactgnnagtgtttcaaaactatgctgttttgtgttgttatagttgtaacatatttctcaattttcctgtttttcttttagtttattgacaagactacctggtcggcctaaattcacattttcattcacgctttttgggcatttgagatcaaagagtaagtatggtttctacaagntacttcattnttctacttattcttttt

SEQ ID NO: 7119 - DNA, 396 bp, Homo sapiens; identical to SEQ ID NO: 6096

SEQ ID NO: 7120 - DNA, 436 bp, Homo sapiens
  unsure (12): n=A,T,C or G
  unsure (13): n=A,T,C or G
  unsure (16): n=A,T,C or G
  unsure (120): n=A,T,C or G
  unsure (139): n=A,T,C or G
  unsure (165): n=A,T,C or G
  unsure (195): n=A,T,C or G
  unsure (224): n=A,T,C or G
  unsure (226): n=A,T,C or G
  unsure (286): n=A,T,C or G
  unsure (305): n=A,T,C or G
  unsure (308): n=A,T,C or G
  unsure (342): n=A,T,C or G
  unsure (364): n=A,T,C or G
  unsure (410): n=A,T,C or G
  unsure (422): n=A,T,C or G
  unsure (424): n=A,T,C or G
tttttttttttnnttnttttttttttttatggaaggttctcaggtctttatttgctctctcaaattccaggaattgacttatttaattaatccatcaacctctcatagcaaatatttganaaaacaaatttatattcanattcttattttcagtagggaagtaanaagttgcagctcagtgcacataaagttganacagagatggagacatccagccccacctntntggaacaagaaagatgactggggaggaaacacaggtcagcatgggaacaggggtcacagnggacacaagggtgggctgnctntccacctcctcacattatgctaacagggacgcanacacattcaggtgcctttgcanaaagagatgccagaggctcttgaagtcacaaaggggaggcgtgaanaaatcctgcatntnagtccctcacaa

SEQ ID NO: 7121 - DNA, 497 bp, Homo sapiens
  unsure (277): n=A,T,C or G
  unsure (346): n=A,T,C or G
  unsure (372): n=A,T,C or G
  unsure (391): n=A,T,C or G
  unsure (396): n=A,T,C or G
  unsure (402): n=A,T,C or G
  unsure (403): n=A,T,C or G
  unsure (428): n=A,T,C or G
  unsure (430): n=A,T,C or G
  unsure (431): n=A,T,C or G
  unsure (443): n=A,T,C or G
  unsure (444): n=A,T,C or G
  unsure (449): n=A,T,C or G
  unsure (460): n=A,T,C or G
tataacacctctagtagaaagcaagcaatagttaaggtggcaggaaggcaatctactttcaaggcttttattaaagtttagaaatgatcagtggtcttcagaagattataaatttcagtctaaactgaaatgcgtttttaattttctgaataagtaacttccagtttacgatgaaaataagtgatcagtttctctgaccaaagaaagaggccattgcatgtgattggactgacctcttcctgtggtgactagaaagtgctaaaagaatattctttantattttctctcatactaaggggttaatatggaatgtgtttgaaattgcaaattgaataattgtccaggntttttttttataccttgctaaattangttcctcttttaatctagngatangatacnngtgatgccagtgatgacagcttttnannagccaaggatannctganttggaaataangctgaaatgaatacatgactgggaataatggggactg

SEQ ID NO: 7122 - DNA, 131 bp, Homo sapiens
  unsure (21): n=A,T,C or G
  unsure (22): n=A,T,C or G
  unsure (32): n=A,T,C or G
  unsure (33): n=A,T,C or G
  unsure (57): n=A,T,C or G
  unsure (58): n=A,T,C or G
  unsure (68): n=A,T,C or G
  unsure (69): n=A,T,C or G
  unsure (90): n=A,T,C or G
ttactaaatatttaggagatnncagtgcattnngggttgttttttttttatataatnnatacatatcnnccctttgcagtgatagcatanaagagtaagtatggccttaggtacaacacgttttttacctg

SEQ ID NO: 7123 - DNA, 388 bp, Homo sapiens
ctgaagtgtggcttgcataaataactgtttattccaaaatatttacatagttactatcagtagttattagactctaaaattggcatatttgaggaccatagtttcttgttaacatatggataactatttctaatatgaaatatgcttatattggctataagcacttggaattgtactgggttttctgtaaagttttagaaactagctacataagtactttgatactgctcatgctgacttaaaacactagcagtaaaacgctgtaaactgtaacattaaattgaatgaccattacttttattaatgatctttcttaaatattctatattttaatggatctactgacattagcactttgtacagtacaaaataaagtctacatttgttt

SEQ ID NO: 7124 - DNA, 308 bp, Homo sapiens
  unsure (17): n=A,T,C or G
ccatttaccagactccnacacaatgggccaccaccagtgtgacagcaggacatcctaatatatggatcttgatttttaagtttcagtatctgaacttcgtaaattagtaacttttagctgggaaagtatagcatgaaaccagaggttctcagaatgactgtaagatagcttacatttcctctttttgcctttatctccccaactaaaatacaatggggaagaagtctgcctatgatctttgaatgagctttttaaggaagaaatattatatattgtttgttaaagtttattgaaataaagaatcattt

SEQ ID NO: 7125 - DNA, 146 bp, Homo sapiens
  unsure (16): n=A,T,C or G
aaaaaaattaaatacncttaatttactaaatatttaggagataacagtgcattaagggtttttttttttatataatacatacatatcacccctttgcagtgatagcatagaagagtaagtatggccttaggtacaacacgtttttt

SEQ ID NO: 7126 - DNA, 318 bp, Homo sapiens
aaagaaaccaccaccaacaacaaaacaaccaaaaaccatgttttatgtcaaagctctgtagcacagagaatgtggtgtcacagatacatcgccgagagaggtttctttctttcttttttttttttgagacagagtctggttctgtttcccaggctggagtgcagtggtgggatctcagctcactgcaacatccgcctctggggttcaagtgattctcctgtctcagcctcccaagtagctggaattacagggacccgccaccacgcccggctaatttttttgtgtggttttagtagaggtggggtttcaccatcttgg

SEQ ID NO: 7127 - DNA, 382 bp, Homo sapiens
aaacttgtgataggcatatctatgaaacctttgtaaatttagtttattgctttaccattattttactaggtaaaattagagaacagattttgttctctaatttttaagccttatttacatatgcagaaacagcttaaatattttgactagattagacaaacagttaatagatccaccattaggaatcaatatattatgtcataataaacatcctttttctttcactgaaatttcttttagaaataaacttatttttgcttgttatgttttgaaacttgacataggatattttccctctggctacacattcacctacccttgttctctatttagattattcaaataaagttagtttgcttttatagcaaaaaaaaaaaaaaaa

SEQ ID NO: 7128 - DNA, 559 bp, Homo sapiens
ggattacttgagccccagaggttgaggttgcagtgaaccatgatcacaccactgcattctagcctgggtgacagagtgagaccctctccctcctaaaaaaatccttaagaaatatattgatgcttggttcctttggtcagaattttgatttaaggtgttgggagtgtagcacagatgttggaataaacctctcaaactgattttaatatacaaacaaggtcgagaaccaccaaggaagagtttttatgcataaagattcctgtactctaccctagaactaatacatctgaatctctgggaatggagtataacaatcagatttgaaaaggtttctttagtaattttaaggactgaccagtttagacactgctttgttagagtaaaatgattaggtacctagtatcaacctagccatccaaccttatattaataactaggaaaataaagggttggagcctctgtgtttctttgttgaaaaatctgctactattattagatctgtgaaaacaattgaaaattcggttattatcaccttaaaagtacaaaacctatagatttt

SEQ ID NO: 7129 - DNA, 374 bp, Homo sapiens
  unsure (269): n=A,T,C or G
  unsure (326): n=A,T,C or G
aaaggttattcactatatgaaaacagaaagggaacaattacaacaatgaaattgttttaacttttttaaatctgattctaatgtgtattgacatatatttaattatataaaagactgtgggaaaggggcattaacagtactctagaagagtaaaggataaaaatccctctttttcccctagcttccagtttgacaagagggaatacttaatcgaatcctgtccacaaaaacagctaacagtactgtgctttgaaaaaaaaaaaaaaaancaaacctgacttcatataattcttaatacatcctgtgctgctgttggtttttttaanacttctagcagtagctataggttccggtctggcactttaggtattttt

SEQ ID NO: 7130 - DNA, 53 bp, Homo sapiens
aaaaaaaaaaaaaaaaaaaaaaaaaaaaaaaaaaaaaaaaaaaaaaaaaaaaa

SEQ ID NO: 7131 - DNA, 317 bp, Homo sapiens; identical to SEQ ID NO: 6103

SEQ ID NO: 7132 - DNA, 115 bp, Homo sapiens
  unsure (12): n=A,T,C or G
  unsure (18): n=A,T,C or G
  unsure (80): n=A,T,C or G
  unsure (81): n=A,T,C or G
  unsure (85): n=A,T,C or G
  unsure (99): n=A,T,C or G
  unsure (105): n=A,T,C or G
ccacttgtgtgngtcctnacaagcaaagagagcactaaacttgacattgggggtccaccactccaactttgctttctganngttntggtgtacattganccccanaaggaaagga

SEQ ID NO: 7133 - DNA, 212 bp, Homo sapiens
  unsure (14): n=A,T,C or G
  unsure (15): n=A,T,C or G
  unsure (106): n=A,T,C or G
  unsure (107): n=A,T,C or G
  unsure (154): n=A,T,C or G
  unsure (173): n=A,T,C or G
  unsure (174): n=A,T,C or G
  unsure (193): n=A,T,C or G
ccaggctgcactgnngctagctcaatgtttgttgcattcagcttctcctccattacttgtttgaggatgatgagtgaagacttgatggcttctttcaaagtcatanncttgtggtaaacttcttgcaaggagctctgggcaccctctgaagcanagccaattgctcgagcatnncactgtacaaaggtcccanatgggtccatatgaaacag

SEQ ID NO: 7134 - DNA, 388 bp, Homo sapiens
ctgaagtgtggcttgcgtaaataactgtttattccaaaatatttacatagttactatcagtagttattagactctaaaattggcatatttgaggaccatagtttcttgttaacatatggataactatttctaatatgaaatatgcttatattggctataagcacttggaattgtactgggttttctgtaaagttttagaaactagctacataagtactttgatactgctcatgctgacttaaaacactagcagtaaaacgctgtaaactgtaacattaaattgaatgaccattacttttattaatgatctttcttaaatattctatattttaatggatctactgacattagcactttgtacagtacaaaataaagtctacatttgttt

SEQ ID NO: 7135 - DNA, 383 bp, Homo sapiens
ccattattccatgtgcttaaatgataatttccttattcagtttcagaagaaaaagaatgaaattgggtaactgtcattgcgttagctttatgttgaattgggaaattgtggcataaagcttaaattcgtgtttatcaaatgtgaaccatagtagtataatgctgctttgtatataatgtaagtgctacaaatagtctcagcactgaaaatgtattgatacctcttaaatgaatgcaacttttgatgtaggtgttttgctatgcctcagaaaatatctgtctgagaatttgttaatctgtttgataatgaagatacttcctgttttcttgtttcatattttcatgttcaaaatttaagttttacatttttactactgttaattt

SEQ ID NO: 7136 - DNA, 263 bp, Homo sapiens
ccactgtctgcagcatgggcagaaagtgctcaaagtccagcaccttcacattcatctcatcactcttggggttccccaggaccttgagcacctcggcgttggtagggttctggcccagggccctcatcacatccccacactggctgtacaggatcttgccatcacctgttcggtcaaacagctggaaggcctccttgaactctgcggtctggtcttcggtgaagtcacacatcttgactgctcagctctccgggaccttttcc

SEQ ID NO: 7137 - DNA, 242 bp, Homo sapiens
ccatcttgttgctgcttggttagatcatatagctaatgaattaggcaggggagctattttttgaagatgatgaactaaatgttgaagacaagtttgagatctgtaaaatgtgattttttacttccacttataatacttgtgattggggaggtttgtggaaattcaattatgatgaaaaacctatcttttttgtaatgttggcatacttggggaatttagtggcaaatacattccccagcagg

SEQ ID NO: 7138 - DNA, 551 bp, Homo sapiens
aaatatatgcttttctagaatttgatgtttgaccatttatgacttaattaccagagagccagtaaattaggacagtgtttcaacaagcctaggctatctcgtaagttgaaaaatatcccactatagttgcttcatgagtatgaagtaagatggcctctgatttacactggttcaatttacaaattttcaactttatgataggtttatcagggtactaaatgcatttcaacttgatagtttcaacttatgataggtttaccaggatgtagtcccactgttgaggagcatctatttaggggttaattactttagtaataagtggaaagtaagataccttgagtaatgtttgcctataaaattgtcagcgtatttttacactattggctcaagaatgttataatgctaagggacataagttggcaaccacttggtttttggaaggactttcggtattgtattagaagtctgccctagctgttaaatttctgggtatttatcctaaggaattaattaaaagagttaatttgttccttttcttcagtgggccattg

SEQ ID NO: 7139 - DNA, 527 bp, Homo sapiens
aaaaattactaaaaggtttactttgttcattaataaaacatttaacaattcaaattatatgcaccttttacctagttgaaaaaaatacacattcctgttttcacattatagcaactgattaagctgaagctgtaagtcattttttatagatgagtgatccgcatctccatcaattagaacactggaaaagatgttttataaaagaggtatttaattttgtttgtaggattaactcatgcaaataataaaaaagatatcctgttggttcaatagtacactgtctcctttaaggaaggaagcgtgatgaatgaatgatgtgtagacttgagggatgactattaaaggggacgtaggatgaagagaaagaacctacagatgacaatgaatgtaaacttatttttcttcatgtgtaagcagtgtgctcgctggtgatatccagatcctaacaagattacttggttagctggttaggaccagtaactggattgcgaccactatgataatattttgaaccaaatgttaatgct

SEQ ID NO: 7140 - DNA, 363 bp, Homo sapiens
  unsure (16): n=A,T,C or G
  unsure (19): n=A,T,C or G
  unsure (26): n=A,T,C or G
  unsure (27): n=A,T,C or G
  unsure (138): n=A,T,C or G
  unsure (161): n=A,T,C or G
  unsure (163): n=A,T,C or G
  unsure (164): n=A,T,C or G
  unsure (206): n=A,T,C or G
  unsure (263): n=A,T,C or G
  unsure (264): n=A,T,C or G
  unsure (271): n=A,T,C or G
  unsure (337): n=A,T,C or G
ctgttctcatacagancgnaaatcannacgaaatatggaaaacatttatttcctttccttcaaaatttaacttacattccactttaatagctgttgaaggttaattaaaatgcagcaaagtataactacgttacgcangtgacttcagttattttaatgtnannaaaatcagactatggtatcttacgagtcattatagaaatgtncatcattaaaaagcatttattatggcactgaactgcatgatgttaccttaagtcatnnacaaaanaattcctggtccatgtgatgtgaatgggcttggcactttctccataaattttgtagatgactattngtaagattatacacttaataggtttt

SEQ ID NO: 7141 - DNA, 526 bp, Homo sapiens
taacagtaaaaaaattaaagagcgttcaagaataaattcttctggtgaaagtggtgatgaatcagatgaatttttgcaatctagaaaaggacagaaaaaaaaatcagaaaaacaagccaggtcctaacatagaaagtgggaatgaagatgatgacgcctccttcaaaattaagacagtggcccaaaagaaggcagaaaagaaggagcgcgagagaaaaaagcgagatgaagaaaaagcgaaactgcggaagctgaaagaaaaagaagagttagaaacaggtaaaaaggatcagagtaaacaaaaggaatctcaaaggaaatttgaagaagaaactgtaaaatccaaagtgactgttgatactggagtaattcctgcctctgaagagaaagcagagactcccacagacctgcccgggcggccgcccgggcaggtccaagaagcatgctggcgagcgcgataagaagctggcggccaagaaaaagacggacaagaagcgggcgctgcggcggctgtagtgggctctct

SEQ ID NO: 7142 - DNA, 437 bp, Homo sapiens; identical to SEQ ID NO: 345
  unsure (368): n=A,T,C or G

SEQ ID NO: 7143 - DNA, 327 bp, Homo sapiens
aaaaaaagaaaacaactgcgaaaaaaaagtaggctatgtatcttaagcatataaacatttgaccctttcttaaaaggtgccacaggtaatactaatctattttctatgtggaaagtgtttatgaatacagaaccaatttaggcaaaatgagatgcaaattattctagatgtaaagagttgaattttttttttaaagtacacagttttaacatactatccactctatcaagcagacttagagggattccggaaggcagagctttcagtaaccttctaaaaaattattcaatattattacacagaatcagagattgctgtgatttttat

SEQ ID NO: 7144 - DNA, 547 bp, Homo sapiens
ctgctgacagttctttggtggaaaagtaagttgcgtacttacccaagctgcccaaatgattatcaagccaagtttgtttttcaaaaataggttttaagatacaccaaagaaactatacaatacaaaaatttaacaatgaagttaaagtatatagcaaaagccaaatatgacaacacacatgtataatgtagaaaagaatcctttcagtcctagaaaactaaaatggggagaacttactgaagggtaacatacataaaatgagtactaatagcaaggaataatcctaaacattttcccaataaactgactaagcctcaaaaggacagcttaggaaaatgattaacatgcagtttttcttttttcctagccaattcagttctacttagataaatctggttgccaatcaatacatatataaattaatttttttctgctcaattactaccattttttctttttcaccttttccccaattttctctagcaacactttttcctttggtttgatcagttgaactcaaaaggtttggtacctaaaatgagtatca

SEQ ID NO: 7145 - DNA, 228 bp, Homo sapiens
ctgcttgcctgcaaagatgagcctctgctggtcgggggggatgccttctttatcttggatcttggccttcacattttcgatggtgtcactgggctccacctccagagtgatggtcttgccggtcagggtcttcacgaagatctgcataccacctctcagacgcaggaccaggtgcagggtcgactccttctggatgttgtagtcagaaagagtgcggccatcttccag

SEQ ID NO: 7146 - DNA, 404 bp, Homo sapiens
  unsure (16): n=A,T,C or G
aaattttctcacttangacttttcaaagccatctcaaaggagcttcctcaaaacatttaatgttggcatcaccccacaagtactcagaaataagtgttaaaatagaaatccaatccagtaatgggaaactgacttagattatcttatttgtttgtatatttatttgtcatctatctctcttattcactgccctattttcaacatctacaatagtgcttagtaatgaatacacatgcagtacacaaaggtgctaacacaatacatgactaatgatgagggctatgcacatttatacagaatgagaattatttagtccaaaaaatatctggaaagcataaatgctgtaattggataaagctaaaattctattactctattgaaatcagatatcaagtgatactttt

SEQ ID NO: 7147 - DNA, 267 bp, Homo sapiens
aaattacaaagtaataaaaagctttgctatttaattaaaaaaaaaaaaggaaaaaggggaaacagaggtaaataaattaggaaaacacacacacggagaaaacaaacaaaaataaaataaaataaaaacaaaaaggtgttaactaggaaggatgggttaatccaaaacccagccctgactccaggctcctcctcagaaaggtggaaccagggagaggggggaccccaggtgactgtcaggaccagggaagtaatttataactcagag

SEQ ID NO: 7148 - DNA, 492 bp, Homo sapiens
  unsure (13): n=A,T,C or G
  unsure (14): n=A,T,C or G
aaatggtattacnnataaattaatataaaatgattacctctggtgttgacaggtttgaacttgcacttcttaaggaacagccataatcctctgaatgatgcattaattactgactgtcctagtacattggaagcttttgtttataggaacttgtagggctcattttggtttcattgaaacagtatctaattataaattagctgtagatatcaggtgcttctgatgaagtgaaaatgtatatctgactagtgggaaacttcatgggtttcctcatctgtcatgtcgatgattatatatggatacatttacaaaaataaaaagcgggaattttcccttcgcttgaatattatccctgtatattgcatgaatgagagatttcccatatttccatcagagtaataaatatacttgctttaattcttaagcataagtaaacatgatataaaaatatatgctgaattacttgtgaagaatgcatttaaagctattttt

SEQ ID NO: 7149 - DNA, 342 bp, Homo sapiens
aaaaatggagcacagtgacgagaatattcaattctggatggcatgtgaaacctataagaaaattgcctcacggtggagcagaatttctagggcaaagaagctttataagatttacatccagccacagtcccctagagagattaacattgacagttcgacaagagagactatcatcaggaacattcaggaacccactgaaacatgttttgaagaagctcagaaaatagtctatatgcatatggaaagggattcctaccccagatttctaaagtcagaaatgtaccaaaaacttttgaaaactatgcagtccaacaacagtttctgactacaactcaaaagttt

SEQ ID NO: 7150 - DNA, 363 bp, Homo sapiens
  unsure (337): n=A,T,C or G
aaagttacagagtgtttcctagatagaagattagttcatttggttcattttgtctttgaagcaagccaagctcatgagccagttggttatttgtcataaatgaacacccatcactatatgctatgttgaggggaggcaagtctgatcttcgaataattgataaagtttaatatctttgtagccaaaatacaatttgcaaaccctaactccagatgtgtcgtatgaatcttgacaaccaggtcttgagatttgttttactgattgccaatcaggtatattatttgtgatgttcgtgggagcatgcaaattagaagacagtgttgtgggagttcctcantattgaattacatgtgtgcactcagg

SEQ ID NO: 7151 - DNA, 297 bp, Homo sapiens
ctggcgacgtgccactttgcgctaggggagtacagaatgacatgtgaaaaagtccttgatttgatgtgctacatggtactccccattcaagatggaggcaaatcccaggaggaaccctcgaaagtaaagcccaaatttagaaaaggttcggatctgaagctcctgccttgtaccagcaaggctatcatgccatactgcctccatttaatgttagcctgttttaagcttagagctttcacagacaacagagacgacatgacattggggcatgtgattgtgttgcttcagcaagagtgg

SEQ ID NO: 7152 - DNA, 334 bp, Homo sapiens
  unsure (18): n=A,T,C or G
  unsure (256): n=A,T,C or G
  unsure (277): n=A,T,C or G
  unsure (311): n=A,T,C or G
aaaagatttacatgttcntatacaatttataaagttaaaaattctctgtacaaaatcttacatgtacagagtttatataagccccattcttatggctgtatcaccacacagatttgcttaaaactataatactacaaacactcgggttcttcatattcaatcttggcacccatatagcaatacactattctgaaatgtaaattacaaaggaaataaaatgtaatcatgcagacattttttaatataagaaaatgcnataaaatatactacaccagancaacatttatcaattccatagatactgagttttnaacttactgcactgttttcatat

SEQ ID NO: 7153 - DNA, 304 bp, Homo sapiens
  unsure (14): n=A,T,C or G
  unsure (15): n=A,T,C or G
  unsure (17): n=A,T,C or G
aaaaatacaaattnnancaaaatattaagaatttttaggatgggaattataaaagtcaacgctgaacaaaattctacttttagatagtatgtatcttaaaatattatgaaaaatattctttattctgaaaacaatgtcaggaaagaatacctgagttctctaaaaccactagttctaatttcaaattgctgttttggtaacataaagaaaacacatttacaatttaacactgcagttacctgtcaaataattagaatagaataaatgttgcatatacattaggttgaacattatatatattttt

SEQ ID NO: 7154 - DNA, 402 bp, Homo sapiens
aaaaagccaacactttgccaagcttgttatatcttattatttcttgattctctttgagtaaaaagcccaaatgactgtatggaagagagatgaatggtagaggagagaggaaacacaggttctctaatgtactaaatcaggactttggcaaggaagttataaaaatataatatattcaaatcagtaacttcataatttattagacatcccatttattagaactctaagttcttttgcttttatataaatgaaacatttattctataaatagaaatgtatttttcagaattttctttgggttggtttcttggtagcatctcccagtaatacatgaataacatactgaaaccatgatacaatgtttaggtagatatacatatacatatgtggtcatgtgttttt

SEQ ID NO: 7155 - DNA, 346 bp, Homo sapiens
  unsure (78): n=A,T,C or G
  unsure (133): n=A,T,C or G
  unsure (173): n=A,T,C or G
  unsure (194): n=A,T,C or G
  unsure (206): n=A,T,C or G
  unsure (215): n=A,T,C or G
  unsure (218): n=A,T,C or G
  unsure (237): n=A,T,C or G
  unsure (295): n=A,T,C or G
  unsure (302): n=A,T,C or G
  unsure (316): n=A,T,C or G
  unsure (317): n=A,T,C or G
cctgagcgtcaatcatatgttgcagttagtatacaactgactaaaacaagcaagcagagaaaagcatcagccttccanagttactgtctgcttaaggcagaaacagcagtaaataatgaggaaaatgaattanctccagtgctggaacaactaactaacttggtgttacctgnaagtgaaaactcaagtgtcanatgaagggaggnggagttatnctnttatagtacagtggcctgntatctttttaatgaatatatacaagccaacatccaatttctattattacaattagggngtcttgngagctgtgttatgnnaatatggaggaagaaaactatattggctg

SEQ ID NO: 7156 - DNA, 201 bp, Homo sapiens
  unsure (13): n=A,T,C or G
  unsure (14): n=A,T,C or G
ggagaagacagannataaagataaaccccttatttataaaggtgaggggaagtggcttcgaaacattgactattaccgtttagatggttccactactgcacagtcaaggaagaagtgggctgaagaatttaatgatgaaactaatgtgagaggacgattatttatcatttctactaaagcaggatctctaggaattaatct

SEQ ID NO: 7157 - DNA, 559 bp, Homo sapiens
aaatggacttttctgtaagaatgtaaaactcaaaaatttgtcaagtatgtatctgatccacacaagtccctagaaaggttttctgtgtagtcttcattaacgcaaatctttgtgaatgtttcactcttactgtaggatcttgaatatgttttacaataatgaagctacaaagtttttatgcagtgcattcattgtaaactataaataacatttgtattaaaaggaaagctgggtaatacaaaaataggagagactctgaggagcaggcaatctgttgaggctcagtatatcttatttgctttgtagtctgctgtcattcctttcaaagagcacacagcacatgaggcatagtaatcatctgtcttgttaacctctctaatttagaaatctgttgttcgtaaaactggaccaattatcacaaactatcatttgcataattaaccgcaagtctgttacaaagcattttgttagtggtatcaacaaatgcaggaggatggacatttataaaaaatgggttttgttaagcttgccaactccttagatatcatggactatactg

SEQ ID NO: 7158 - DNA, 286 bp, Homo sapiens
  unsure (42): n=A,T,C or G
  unsure (47): n=A,T,C or G
  unsure (103): n=A,T,C or G
  unsure (110): n=A,T,C or G
  unsure (149): n=A,T,C or G
  unsure (164): n=A,T,C or G
  unsure (171): n=A,T,C or G
  unsure (177): n=A,T,C or G
  unsure (182): n=A,T,C or G
  unsure (187): n=A,T,C or G
  unsure (199): n=A,T,C or G
  unsure (202): n=A,T,C or G
  unsure (207): n=A,T,C or G
  unsure (210): n=A,T,C or G
  unsure (230): n=A,T,C or G
  unsure (264): n=A,T,C or G
  unsure (274): n=A,T,C or G
  unsure (276): n=A,T,C or G
gtacaagcttttttttttttttttttttttttttcaggccanaccanaacatttttattggtttagtcacttaggcatgctaaggtccccctgggttaggganatttcanccgtgagtgtgcaggtgtgcatgcacatagggggatatntattgggatgcaaanaggtganagcagntcttnaaaancgctggcaaaanaanaatgngtnttgaaaccatgacgggttanaagctcctaactccacttccagggctgccttcanaaatcctttntnttgaccatgg

SEQ ID NO: 7159 - DNA, 485 bp, Homo sapiens
  unsure (15): n=A,T,C or G
aaatatagcattcanattgtaattggtatgtttttgccatctggtccactcaattgtatatttttattttgcaaaacaacccaaaacttactttacgttgctttgttcagtaccttttgaattcccccagaagagttgttttcaaaacaaacattccagaatgaatgtcgctcttcaatggaacgtctttattgtgcttgaagtatttcttctctggttgtaattctaaattacagagtcatttgagctttctcccctcccgctagtatctttacaggagcagggaagagcagtagaggatgtataattttgggcgaagttaaattacaatttatttgaggttattcctaaacctatttatttggtgttttggaggagatcacacactaagagaacgttgattgcctcggctattgtgctggctggacactttggtcactttttgaagcatgttaataaatgtcactgattaaaaacagacctgc

SEQ ID NO: 7160 - DNA, 291 bp, Homo sapiens
  unsure (11): n=A,T,C or G
  unsure (12): n=A,T,C or G
aaaattgtttnngtcttttcttaaagcaatattcactgttacaccttggggacttctttgtttatccattcttttatcctttatatttcatttgtaaactatatttgaacgacattccccccgaaaaattgaaatgtaaagatgaggcagagaataaagtgttctatgaaattcagaactttatttctgaatgtaacatccctaataacaaccttcattcttctaatacagcaaaataaaaatttaacaaccaaggaatagtatttaagaaaatgttgaaataattttttt

SEQ ID NO: 7161 - DNA, 315 bp, Homo sapiens
  unsure (14): n=A,T,C or G
  unsure (150): n=A,T,C or G
aaaactgtggattnttttttaagttacagaaaatccagttctgcaccacaatacaactgtaaaaaaatctgcatcatcttaaaactgtgcagtaatgccatttttataactgcataaattttattagcgttctaaacagttttgcaattnttttttgtattatatgcttgcaggttatatcttagtgcaattcagtcccaaatactttaattttgaaaagaaaaaaaaacatacatttttgagtgtaaaatacccctacaagatataaacaggggcgttttcccctcttaatactttggttttcaatacagtcag

SEQ ID NO: 7162 - DNA, 423 bp, Homo sapiens
  unsure (12): n=A,T,C or G
  unsure (16): n=A,T,C or G
  unsure (17): n=A,T,C or G
  unsure (25): n=A,T,C or G
  unsure (33): n=A,T,C or G
  unsure (34): n=A,T,C or G
  unsure (286): n=A,T,C or G
  unsure (312): n=A,T,C or G
  unsure (313): n=A,T,C or G
  unsure (330): n=A,T,C or G
  unsure (343): n=A,T,C or G
  unsure (344): n=A,T,C or G
  unsure (402): n=A,T,C or G
  unsure (418): n=A,T,C or G
ctggcaacttanacgnngggagcanagaattcnnttatccaacatcaacatcttggtcagatttgaactcttcaatctcttgcactcaaagcttgttaagatagttaagcgtgcataagttaacttccaatttacatactctgcttagagtgcaagagattgaagaattctcttatccaacatcaacatcttggtcagatttgaactcttcaatctcttgcactcaaagcttgttaagatagttaagcgtgcataagttaacttccaatttacatactctgcttanaatttgggggaaaatttagaaatatnntggacaggattattggnaatttgtctatanngaatgaaacattttgtcatataagattcatatttacttcttatacatttcgataaagnaaggcatggttgtggntaatc

SEQ ID NO: 7163 - DNA, 321 bp, Homo sapiens
  unsure (42): n=A,T,C or G
  unsure (43): n=A,T,C or G
  unsure (51): n=A,T,C or G
  unsure (52): n=A,T,C or G
  unsure (286): n=A,T,C or G
tcttaatatccttccctataatttcaattatttggattaatnntagaaatnnaataggtttattctaaaattaatccaaataattgaaattatagggaaggatattaagaagagaaaagattacaagacagaggaaagcataaaagaaaataaggtaattaaaacttcaaatcaggaaaaaggttctcaaaaatctgactttgcctacccaggtacagttggtggctatcaaattaggactcagtaattacttgtgtcactgagtgaaagctgctcattgctgccnagaacctacagagaaggccaaggggctgacgtaca

SEQ ID NO: 7164 - DNA, 417 bp, Homo sapiens
aaatatttattttcaaaacccctaaaacactggagtatgcttcacctagaaacagattacaggacgaatagctataatgaataagcaatacaatttgtatttgggatgcaattgtgttgtaaagtttcaaataatcaatttataaatttgttgcttttacttttacaaaaatattcatttaacccataacatgagttgcaaaattatctccagacttctacagatgattataaactgtaattgtgtttcagttacacagcaggtgaaaaatttaactgaaccgttacttcaaaatacaatgcattaaaaataattgttacaatataggcaccaataaaaagaattttcttggcatacaacaccacaacaactttctcaagtatctgtattatgtaaattaaaaagaggatgtaatgg

SEQ ID NO: 7165 - DNA, 545 bp, Homo sapiens
ctgcaaataatgcttgaatacaagtggctaagccaacaacagaataaatacttttatagtagttttataatcctgaaattcgaaagctttcccaattgcacttgcatctaaacaaaactgttgcagtttttactctatttattttgttccccatgtttatgaaagtcctgcacagtttcaaaggcatggtaaataatatatcaatgtttatgtagtctgttacagaaacagctatagataacattatccagtgaagagcaaaattcaagctttagaaaatattcatgcatgcaattttgacatatctaaaaataggtttttgtatatttatggtgggaggtggttgggaacttttaacaaaatggggtgttaatttttgtacagtctgtgggcatttacacatttttaatgtattaaaatttggtaattatgtgtacattaaattaataaaagttacttctagttatgatttgtgaattccctaagaccttggattttttttaagtaactttatatcagaaatgatactgcatctttatattttt

SEQ ID NO: 7166 - DNA, 379 bp, Homo sapiens; identical to SEQ ID NO: 4720

SEQ ID NO: 7167 - DNA, 498 bp, Homo sapiens
  unsure (450): n=A,T,C or G
cccaacttgcccttcaagttctacttcagtttgataaggctataaatgcagcactggctcagagggtcaggaacagagtcaatttcaggggctctctaaatacgtacagattctgcgataatgtgtggacttttgtactgaatgatgttgaattcagagaggtgacagaacttattaaagtggataaagtgaaaattgtggcctgtgatggtaaaaatactggctccaatactacagaatgaatagaaaaaatatgacttttttacaccatcttctgttattcattgcttttgaagagaagcatagaagagactttttatttattctagaattgcagaaatgactacactgtgctataccagagaattccagtagaaagaaacttgtaactctgtagcctcttacatcacctttattatacagcatgaaaaaccataacttttttttaangacaaaagttgttgccttcctaagaaccttctttaataaactcatttt

SEQ ID NO: 7168 - DNA, 384 bp, Homo sapiens
  unsure (10): n=A,T,C or G
aaaacattgntttctaaacactaacaaaaaaaattaagggcaaactgaaaatacaaatgagatttacaggcactgtgtgtagaatgtgcaaaaattcacttagcttttcttttgtttttttggtgttgctttaagaaactttatcaaatatatttcttacaaatataaagctttctctcccaattgaaggcaattaaaaaaattcaaagtttatcaatactcagtacacaggtgaaccagtcaaattcattttctttctggaaaagaataacaaaccaatatttaggatgttcagagactcaacaaaaaccattctagaaatcacccagaacaattgttttctgttgccaaagccttttgttcttcaaaagtcaccatccacca

SEQ ID NO: 7169 - DNA, 509 bp, Homo sapiens
cacaatttttaacgcttatgtagtccgccatcaaaacatcaatgtactgaagattttaagcagcatgaggcaccatcacgtttttgtttcttccccctcatttccccgcccctaccagatctgtttttgatgtttagcctagaagtagcaagaaggatgaactgaagcagattagagatcgagctggtaatccagatgagaaataatgaaagtcttctctagggtaatagtggtgaggtaaaggcaaaaggatagctgacagacgttaggaggtgaaatggcacaggacttggtgaaaaactggttaggagaagaggaaagagaaaagcccaggttatcctcagatttatggtttggacaacaggaagaatagcaatttctccaagtcgagtcctattataaatattttcatttttgtattttcacttttgagtctcaatttaccaagataacttcctttcaatcagcaaaacacctgtttactacttactaacaatattaaagatgca

SEQ ID NO: 7170 - DNA, 515 bp, Homo sapiens
  unsure (14): n=A,T,C or G
  unsure (17): n=A,T,C or G
  unsure (288): n=A,T,C or G
  unsure (412): n=A,T,C or G
  unsure (423): n=A,T,C or G
  unsure (449): n=A,T,C or G
  unsure (461): n=A,T,C or G
  unsure (465): n=A,T,C or G
  unsure (469): n=A,T,C or G
  unsure (491): n=A,T,C or G
cagaggcaactgtnccncgtcagaaaacagaaggaaagaacttctccagaggataattgtggagcttgttgaatttatatctcccaaaacccctaaacctggagaacttgggggaagaatatctgggtcagtggcttggagagtagcccgaggtgaaatgggtctacagagaaaagaaaccttgtttattccctgtgaaaatgagaagatttctaaacagctccacctttgttacaatattgtgaaagatcgttatgttcgagtttcaaataacaatcaaaccatttntggatgggagaatggcgtgtggaaaatggaatctatattcagaaaagttgaaacagactggcacatggtatatttggcccgaaaggaaggatcatcttttgcttatatttcctggaagtttgantgtgggtcagntttggcctaaaagtagatagcatttntattagaacaantagntcanacttttcagacttggaacagtngaatggaaattgcgatctgataca

SEQ ID NO: 7171 - DNA, 205 bp, Homo sapiens
gaaggaaagaacttgcatgttggtgaaggaagaagtggggtggaagaagtggggtgggacgacagtgaaatctagagtaaaatcaagctggcccaaggtgtcctgcaggctgtaatgcagtttaatcagagtgccattttttttttgttcaaatgattttaattattggaatgcacaatttttttaatatgcaaataaaaagttt

SEQ ID NO: 7172 - DNA, 460 bp, Homo sapiens
  unsure (393): n=A,T,C or G
ggcagtggtaccatgttttgttctcccatataaacatcacacatccaaaacatggtaccactgccgtaaatggatgtgtgatgtttatatgggagaacaaaaagctgatgtatagccctgtatacagtgtagatactatttttgtaaaaacacaaggctaaattaatgaacaagaatactgaatatttcatcattaaaaatttcttgtatttcttgtgcattaatctgacgataatttccctgtatattatgttcatttagctgtttgtaatttttgttaattagatcaggttgtctgcatttgttggtgtaagtgaacatcatcacagttatcctgagttgagtttaagccaaatacatgcatagaaaagggtcttcctattaatggaaganggtaatttttaggatgtgtattatttcagttttgtatgtttaactttttattaaataaagtgttttt

SEQ ID NO: 7173 - DNA, 361 bp, Homo sapiens
aaacagatcaactcaatagttaacgttatataataaagaatatggtaattttaatgacaaaaatcgtattgtgaaatagcgcactctatactgagatgaatgaggggaaaaaagtcaaaactcctttcaaaactatattcaaagcatcagaaaaaatttttttttctttttacaaagttatgtataagtcatagggaccaccaaatactgaaatatgaagactctatgaccaaagttcaaaactgattttaaggaactgtgtgaagcaagacaggaaaatttgtatttaacactctatagaacttcacagtaaagctggaatttagagactaatggcttaacaggagtactgccaacaagg

SEQ ID NO: 7174 - DNA, 417 bp, Homo sapiens; identical to SEQ ID NO: 4827

SEQ ID NO: 7175 - DNA, 365 bp, Homo sapiens
  unsure (12): n=A,T,C or G
  unsure (13): n=A,T,C or G
cgtttatctcgnnctttaatttgctaaagctgtgcacatatgtaaaaaaaaaaaaaaaaagattattttaggggagatgtaggtgtagaattattgcttatgtcatttcttaagcagttatgctcttaatgcttaaaagaaggctagcattgtttgcacaaaaagttggtgattcccaccccaaatagtaataaaattacttctgttgagtaaactttttatgtcatcgtaaaagctgaaaaaatccctttgtttctatttataaaaaaagtgcttttctatatgtacccttgataacagattttgaagaaatcctgtaagatgataaagcatttgaatggtacagtagatgtaaaaaaaattca

SEQ ID NO: 7176 - DNA, 577 bp, Homo sapiens
tttggattttatttgagccaaaatatatatacttaattttagttatgccagaagtaagtataatttctcagtccaaggatgttaggaagcaacttacagagcatgcttcaaatagaattctcttggcctttgaaggtaactattttcaaacttaatagtagagtcaagcaagaatggacaattagagttttcaaaattgaaaaatattatgtattttatataatcattacctatggtttacagattttatttttatgatacatatctctaagtagtggtacactgaggacatagcaaatatgcaataaatacttattaagctgaagtgaactaacaaaaaccattaattacaccatttctaacaaccaaaccagctattgcttttcagtgttttggtgatacgttggagtaggaagtcatattcaaattggttagatccttggaagaaatagtagtatttgtttttagagtagaagactgcatcaattttaggcccgattccttggaagttcttggtaatcagtttgggataaccagggtccatcatctgtctcctttcatcatacctccaatactg

SEQ ID NO: 7177 - DNA, 571 bp, Homo sapiens
  unsure (14): n=A,T,C or G
  unsure (506): n=A,T,C or G
  unsure (527): n=A,T,C or G
  unsure (540): n=A,T,C or G
aaagaacttttgcnctgtgctgaaaatgaaatatctcttgcagtaagtaatacaatgtgccaattcataaaatgtaagttaacaggtttctcaatttaacattttcaaagacgatattaaggtcaaaaatgtcacatctatggtagcacatatagaagggcattatagatatgatgtccatccctatgaagcttacaaatttgacaatgctcaataaaagcttttagaatcacatccaatagtgtcacagtcaaagaatcacaaatctgtgtcctgtaagttctctccttctaaaatcttcatgttaacttttctactcattgccatttgttaatactaacccttaaaaaaaagaaataggaaaagaaaggctgcaataaacttgatcaggtacagaaattattgctactatacttcactacaaagcttgtctatacagtatcatatgacctttgattatgaaaaaatcagaataaaaatctttagtgacataagccttacaatcntatacaacattcacatggcantattagacagttnagcacccaatacccatagttgacaaaatgtc

SEQ ID NO: 7178 - DNA, 399 bp, Homo sapiens
  unsure (12): n=A,T,C or G
  unsure (13): n=A,T,C or G
  unsure (130): n=A,T,C or G
  unsure (131): n=A,T,C or G
aaagcactaatnnattgcagtctttattttagaaaaatgtgaagcatttttttctcccctaaaatgaatatatttagatgacaagtctttagtgctggtagaggaactaattgattttgtactatagtannaaagtgtttatatgtttcaccagaaataaaatatgtagggtttgtatgtaatcttctgtgtttatcctatgttgatttaccttaaatttgcaacatacatatccacataaatattcatgactttcttatatttcattaaaatgttttatggcttcttaaaatcatcactgtgcttctaaatatttttacgtaaaatcattgtataatgctatactgtgatatacatgaaagtttatcttgaacagtgctctttaacaatattaaattt

SEQ ID NO: 7179 - DNA, 198 bp, Homo sapiens
  unsure (10): n=A,T,C or G
  unsure (12): n=A,T,C or G
  unsure (13): n=A,T,C or G
aaattattancnncttaacagtttagtcccacctcttacttcctgcctcagtctgctttctctactgtctggattaattaggcagcctgctataaagttaaagtcacacatttctattttgcaaacactgtgattactctttgctttgtagtttgctttgctttgtagggttctgcttttaagtttttctctttttca

SEQ ID NO: 7180 - DNA, 357 bp, Homo sapiens
ccaagacactaatttttatgtataatcacaatattttatactcacctttattgactaaaaataattatgctacatgttgtcctgcatcagaagaattatttcttcttgccagtgttttgggatttgaagataatggttcactcaaagaacctattattttctctactgaggaacccaatgtagaacttgcactgatatttttattactgcctttatatgaatctataggtatctaaatgttaaggcatgtatgatctttgatcatttcttttttcaaattaaagttgtataaaagtttcaatatcttgccttaaattagttgcctattctttctaggattcaaatattgtgacattt

SEQ ID NO: 7181 - DNA, 342 bp, Homo sapiens
  unsure (248): n=A,T,C or G
  unsure (249): n=A,T,C or G
  unsure (268): n=A,T,C or G
ccacttgtgtgggtcctcacaagcaaagagagcactaaacttgacattgggggtccaccactccaactttgctttctgaaggttttggtgtacattgagccccagaaggaaaggagagtatctgtgagtgggggcctcccttgaccccagtacgaagtctatgccctgaatccccagagtagcccttcctggtgcccaactggcctggggacaaacagcgtccactacatctaggactgccggctaannggacacacttcttgacctnctaccaggaactttggtaaaagctagctttggggaaggggttgggtgtaaatatgagagggtggagggagacca

SEQ ID NO: 7182 - DNA, 451 bp, Homo sapiens; identical to SEQ ID NO: 2871

SEQ ID NO: 7183 - DNA, 298 bp, Homo sapiens
aaaggcttaatggcaataatcaggggaggaagaagagtatgtttattttacataactgacggaaaaataaattcaacaaatagtaaatagaatttaatatggtctcatgcgccctgaaggaggtggtgcccgatttggaggggtaattgctatgtccaagtaatctcctatctggaacttctgcgactgcagggtcatggaatcatcagtcccctttctgccagacatggtgctgccaatctccttaactcgatagccaggtcttttaacatctgtaaaaacgattgcaaaattgaag

SEQ ID NO: 7184 - DNA, 540 bp, Homo sapiens
ccaacatggtgaaactctgtctccaaaaatacaaaaattagctgggtgtggtggtgtgcacttgtggtcccaggtacttgggaggctgaggcaggagaattgcttgaacctgggaggtggaggttgcggtgagccgagatcgcaccactgcactccagcctggtgatagtgcaaaactccgtctaaaaaaaaaaaaaataataataataataaaaacaagtcctaagaaaaatgcccaggtgctttctggcatggtgatttgcaccacatagaactaaagacgatgtcagaccaagcttcttcctttctctctccccgcataggatgaagatttgataaagtggaaggcactgtttgaggaagtccctgagttactcactgaggcagagaagaaggaatgggttgagaaactgactgaagtttctatcagctctgatgccttcttccctttccgagataacgtagacagagccaaaaggagtggtgtggcgtacattgcggctccctccggttctgctgctgacaaagttgtgattgagg

SEQ ID NO: 7185 - DNA, 335 bp, Homo sapiens
gagccctttaagatgataaaggacccaatgcaggtaatcctgtttttggactcacgtaatgtagaatgcaaagtttagtgattatttaatctgggcctaagctagtgagagtatggaacaatggcccataaggactcctaagcgccgaagccaaggagcctcctcccttcctggttcaccccgcccaagggacctgcccccattcctgtggccctggggcccagcttccaatagtgtcagaagcaacttgtggctttgccttggttgtgagatgggtacattccaaaggagcagcctgggggagggggcaggctcagccagcccttggaggctca

SEQ ID NO: 7186 - DNA, 345 bp, Homo sapiens
  unsure (12): n=A,T,C or G
  unsure (14): n=A,T,C or G
aaatattttggncntattttataataaaatattttggcaaaaataaaatataaggtttagtttattttctattaatggtagatctggagagtattttacatttctaaatagtatctacttaatttgactgctttcacatttgtttctgaaaacactgctattcgcttttcagaattttgagattaaaagcacctaaaaataagataaaataaaatttaagtaaaatatttgtttgatgctcgaaagttgacaaattcacaaacttactttaagtgtcttacatgatatatgccaccacagaaactttattgcctgctaagacttatttgactaaatctaatcttt

SEQ ID NO: 7187 - DNA, 226 bp, Homo sapiens; identical to SEQ ID NO: 6075

SEQ ID NO: 7188 - DNA, 405 bp, Homo sapiens
  unsure (11): n=A,T,C or G
aaaaatctggntataaaaaaagtaataacctaattttttattaaaaaagaaaaaagaatttttaccaaaacttcaatatagaagtgaatgtgcttagaatggtaatagaggatctaacttttaaccaggctatcaacttctggaatatttactttcaatttggaaaaatattgttattcagaacctgaaatacattataaaactggaaatggaatcttttaggtgaattctttctttcaaaccctcataaatcagaaaaaataagccaaatttgaaggcaaaagatctttacatttagggatagtttctaatgaaagaaatcaagataagaaaaatcaattaaaacaatgtggtttaagaaattatcctcctaatgtagggggtgggaaacagatattacatttt

SEQ ID NO: 7189 - DNA, 581 bp, Homo sapiens
  unsure (539): n=A,T,C or G
cctgtccagtctttgaaaacatcaagagatacttcaccctcaagtggttcagcagtttcttcatcaaaggtgttagacaaacccagtaggctaactgaaaaggaacttgctgaggctgcaagcaagtgggctgctgaaaagctagagaaatcagatgaaagtaacttgcctgaaatttctgagtatgaggcgggatccacagcaccattgtttactgaccaaccagaggaacctgagtcaaacacaacacatgggatagaattatttgaagatagtcagctaaccactcgctctaaagcaatagcatcaaaaaccaaagagattgaacaggtttaccgacaagactgtgaaactttcgggatggtggtgaaaatgctgattgaaaaagatccttcattagaaaagtctatacagtttgcattgaggcagaatttacatgaaataggtgagcggtgtgttgaagaactcaagcatttcattgcagagtatgatacttccactcaagattttggagagcctttttagatttttctgctcangctaaaaaaaaaaaaaaaaaacagtttctaaaaatttttttt

SEQ ID NO: 7190 - DNA, 410 bp, Homo sapiens
  unsure (13): n=A,T,C or G
  unsure (284): n=A,T,C or G
  unsure (285): n=A,T,C or G
aaaaactatttgnaatgtaattttaatgcattttttacaggcccagtaatggttaaatacgtcagcttactgaataattttaactatttattcttctaaggatacagcttgtctctggattttccagtcttaattttatattttattaatctattttaatgcttgcttttcccatttatagacgttgtagcagtaattgcaagaagttcttgagctgaattcctgttgtgacaacttcctataattacagtagataactttttcttttagtcgtatataacttnnctataacttgtgatggacaagagatatgcttatccaataaaataagcttaaatattagatgctcttgggtcaaaatgtccttttaccaaattgacctttttatgagttctttgggtaaatacttt

SEQ ID NO: 7191 - DNA, 181 bp, Homo sapiens
  unsure (13): n=A,T,C or G
aaaaatgtccccnaaaattgcaattcctacaaataaatgtcatagtgcaaataaatgtcaggatttagagaaggagcctaaactgaatttgtgttatttcagtaaaagttatggagttatgggtctagacgtgttaataagttagacagaactttggcactttagaacaaatgcatgagtg

SEQ ID NO: 7192 - DNA, 562 bp, Homo sapiens
  unsure (457): n=A,T,C or G
  unsure (492): n=A,T,C or G
  unsure (529): n=A,T,C or G
aaaagattgtagatgacattggaatctaatttccgtatttgggtgctttcctagtattgtaagaatatgcttaattaatgagtcgcaatgaataatctgtttgtcttgatttgctttctgaaaggtgatgagggttttgggaaatggactttgttcaggcttttgccctttgtggctgtgacatattaagatgttggcagtaaaattgagagccaccagaagatgttaactgtgtatatgggcgctgccagataggaaatccaaatgagtagactatagtgttattgttagctactatggggtgagacgtagacagataaccatatgtaaggcagctccctaaatgctgaaacaaagaaccgtctcttgacttactcctgatgttctcatggtacatggtagctgccccaaaagcttgcaattaattgaaacttctcatttgttaggtggcaggtangtaggttttgaacttggtagtgatattcagacgangagcaagattccactggcagttctgtgatgctaagtnaatgatgtgatcatatccgtgctttagaaagat

SEQ ID NO: 7193 - DNA, 501 bp, Homo sapiens
aaattattatcttcttaacagtttagtcccacctcttacttcctgcctcagtctgctttctctactgtctggattaattaggcagcctgctataaagttaaagtcacacatttctattttgcaaacactgtgattactctttgctttgtagtttgctttgctttgtagggttctgcttttaagtttttctctttttcagacaaattactgataaaaatgatattgctctatatgtaatatatcctgaaagcattattttttgttgaataggaaataaaattaatgaagacagaggctagaaagcatccattaattaatgagacacacttaactacttatctctaaaccatctatgcgaatatttgtaaaaataatgaatggactcatcttagttctgtatataaatatattttctttctagtttgtttagttaaggtgtgcagtgtttttcctgtgtattaaacctttccattttacgttttagaaaattttatgtatttt

SEQ ID NO: 7194 - DNA, 422 bp, Homo sapiens
cgcgagcgtctgggcgggtggtaggaacaatggcgctgtcttaagtggcacagtggagcagctctgaagatgcaaagatacacgaaaaaacttccagaacatctgggagaatatttaatggaaaatcgcttggttaaaacctgacacttttaacagtgaacagcgttctgagtgtggacgagtagccagtgaagataatgaatgtcgaatgtgactgactagcagcttcattttgaatgagggtcgctgtctgcccattgatagaggccagattgtcttggaagttccaaagttgcaacgatttctggctagtgccacgaggtttacttgactgttgtgtgaaaagctgataagaaaaccatccagaaaaaagctcttcgttttacaaacatgaaaataaaacatgtaattttggaacaaaa

SEQ ID NO: 7195 - DNA, 460 bp, Homo sapiens
  unsure (16): n=A,T,C or G
  unsure (398): n=A,T,C or G
atgagttcttatctancgttgcaggccagcaaatacagaggtggtttaatcaaacagctctagtatgaagcaagagtaaagactaaggtttcgagagcattcctactcacataagtgaagaaatctgtcagataggaatctaaatatttatagtgagattgtgaaagcaaccttaaagttttgaagaagactgatgagactaggtgctttgcttcctttcatcaggtatctttctgtggcatttgagaacagaaaccaagaaacatggtaattactaaattatgaggctttgctttttgtttgcttttaagtagaaaaacatgttggcaacattgagttttggagttgattgagataatatgacttaactagttttgtcattccatttgttaaagatncagtcaccaagaatgttttgagttttttgaaagacccccaatttaagccttgccttattttt

SEQ ID NO: 7196 - DNA, 423 bp, Homo sapiens
aaatcatatttcattcattttctccctttagcaattttcattttatttctcataatttgaacagagacagttctcatacatgatcagatgctttttttttcttcttaccatcatttatgcatgacataggtaatgtgactaatttctccagttgattcaagaaactcattactttgcctcaaattatatgtaaaatatttgttttacttaggttacagttatcagaaaggtagtttttttcttctattaaaatataacattgtgaaagaaaataaaatttatgctattctttgctttgtttttataaatgaatttttcatagaatttacagtatattcaaaggaagaaagataaaattattggtcatcatttgtaccttagaagtacaagaatttaagtaaaagaaatgttcatttttgtttt

SEQ ID NO: 7197 - DNA, 585 bp, Homo sapiens
aaaaataaagaaaaaaataccacgactctttgctaatggcttttaagatttgcagacacagctaaatactcatctaacaaagtatccaggctatccaactatattgccatgaattcataagacagtaacacacatttataatataaaagtagtcaaaaaaataaaaagaaacagccacaggtaatttagggctaaaatgagtcctaataagggttacatgagaaataacatataagaccccaaataaattttagatacaaaattaaatgatgtggctttgttcaaacatacctaaaattcaaaatcaagttaaatacctaggctggcttttttatatcaccagctttcattagggctttaatcgctcttgccctcatctcaagttctagcagctccagttgctgtgcagaaggttgaacatcttctggtggaggaacagccagggtggctgctttgggttcgtttgggctagactctgccagtcctagaatctcattcacacttttctcaatgtctttctccaggtcatctatctgaccagcttcactttggactgtattttctggtgcctcgggagcagacctc

SEQ ID NO: 7198 - DNA, 146 bp, Homo sapiens
  unsure (12): n=A,T,C or G
  unsure (13): n=A,T,C or G
aaaaaaattaannccctattaatttactaaatatttaggagataacagtgcattaagggttttttttttatataatacatacatatcacccctttgcagtgatagcatagaagagtaagtatggccttaggtacaacacgtttttt

SEQ ID NO: 7199 - DNA, 603 bp, Homo sapiens
  unsure (457): n=A,T,C or G
aatgtttctaggataggatattaaaaatgattgaaacccatgcatggtgttagacaatttttctaattattccattgagtcagttttttgtgattagtgattatcagagcaaacatcatgtagatagcacaagtatttggagaaacgttgtttgttttgttaccaaaatgttggaaaaatttatttcaataccttttagatttcataaagtgcagtgtatataatgcctactgaaagactgtaaaatattgaaattttctttcaagcaaagtgtaaaaaaatatattgagcctgtaaattgctctgtgactagacttcattgtcgtcttaatatattcttgcatgtgcatatatatacacacatgtgtatatatatgtgtgtgattatgtgacctatgcaatacaaattatgggaatgggcagctttggagtatatatcccataattcttttttcangaatagttgcagtatttacacagcagcatttcttctcaggcttttattgggtgctgttgcttgctatgtatgaagagaaatgtgtcagacaagttttagtgtgttctgaagaagggtgtgaacaacagtgttcatgggcttttaga

SEQ ID NO: 7200 - DNA, 399 bp, Homo sapiens
cctgtccctgcagacatgagagacagcaggtctcatgggggtgacaagctttttttttttttcttaaagaattttcaaaatcaaattccagaatgattttacggagatatcccaggaaaattaaggcttctcttaaacgctaaaaaggcatgtaattgcttgttagcaaaatggatatgacacatctctgatacttttttcattattggttgggctgagcagtcagaagacctggtcgtcgtcttgactttggcaaatgagccggagccccttgggcaggtcacacaacctgtcccagcgagggacaccgagtggcccttcatgtacatccatggtgtgctggcttaaaatgtaattaatcttgtaaatatactcctagtaatttaagattttgttttt

SEQ ID NO: 7201 - DNA, 402 bp, Homo sapiens
cctgtccctgcagacatgagagacagcaggtctcatgggggtgacaagcttttttttttttttttcttaaagaattttcaaaatcaaattccagaatgattttacggagatatcctaggaaaattaaggcttctcttaaacactaaaaaggcatgtaattgcttgttagcaaaatggatatgacacatctctgatacttttttcattattggttgggctgagcagtcagaagacctggtcgtcgtcttgactttggcaaatgagccggagccccttgggcaggtcacacaacctgtcccagcgagggacactgagtggcccttcatgtacatccatggtgtgctggcttaaaatgtaattaatcttgtaaatatactcctagtaatttaagattttgttttt

SEQ ID NO: 7202 - DNA, 417 bp, Homo sapiens
  unsure (143): n=A,T,C or G
  unsure (144): n=A,T,C or G
  unsure (171): n=A,T,C or G
  unsure (191): n=A,T,C or G
ccattacatcctctttttaatttacataatacagatacttgagaaagttgttgtggtgttgtatgccaagaaaattctttttattggtgcctatattgtaacaattatttttaatgcattgtattttgaagtaacggttcagnnaaatttttcacctgctgagtaactganacacaattacagtttataancatctgtagaagtctggagataattttgcaactcatgttatgggttaaatgaatatttttgtaaaagtaaaagcaacaaatttataaattgattatttgaaactttacaacacaattgcatcccaaatacaaattgtattgcttattcattatagctattcgtcctgtaatctgtttctaggtgaagcatactccagtgttttaggggttttgaaaataaatattt

SEQ ID NO: 7203 - DNA, 361 bp, Homo sapiens
ccacattgatgataatttctagaactagtttctgagattgtcagccctttgtctaaaataatggcagtattaatgattgacttctgtcactgccatagttacctggattgtcagccttggtagcctttgtctaaagtcctaaagagttccaaaaaaaatgtgttgaaatttaattgctaaatagtggttggtgattctttacagtaggaattgtaataattttcttgcaaataagttatttactgctattgatattgaataatttgtcttttattcagatatatttcaaaaagcatgaatatatgattattcataaattgtatactttaccagtaagttttcagaggaaataaagactttt

SEQ ID NO: 7204 - DNA, 582 bp, Homo sapiens
aaataaactagttacttgcactttacctgctggcttttccatttggtagataacattctgaactccagcagagttttataatccccacgtgcttaaatatactaaatgttctttttccattaaggttaatgttcgtgaagaaattgaagagttttttccaagaatgtggaagataaatcaagataaaagaaggctaatgaaaagtattaaagatcagaaaattaaaattgaatgggggaaaaaattgaacagaagattggtcagatagaagcacttgaatatttttttaaggctattttgaattgtttgaattggggaagaatacacgaagtatgaaaaatgaaaaactcaatgaagaatgaagagaagtagaaagcaagagtgaagtagaattaaaagaatctggaagaatgaatgggtcctaggttaagtaaatgtatggtttatgttccagtgtctgtatgatcaagttgtagatgaatttgcatgattacttagttaatagagaattggtgatctggttcaagtagggaattattgaggacagttagcagtattaacagtgggttattattgagctga

SEQ ID NO: 7205 - DNA, 385 bp, Homo sapiens
ccattttaattttgcttttgtaataataccaagcccagtttctttcaacttgagagatgagctatttattcttttacttaatgaagatgtaagaaatgatcttctgttctaaaaaaaaaaaatttctctaatgtctcttgaccctgtagaaacacattcagtttctacactgcaaaacagagggatatctgtatggcttccctctttccatctttcctttcctcagggaaagccaggaaaaagaaatcttttctatcacagcagacacaccaaatctccctaagttgtaccgccttaattcctcagaatgcaattgtgtatgataccaagctacaacttgataagaaattgtgattttcttcttttattttcattctccaatttt

SEQ ID NO: 7206 - DNA, 537 bp, Homo sapiens
  unsure (38): n=A,T,C or G
  unsure (197): n=A,T,C or G
  unsure (298): n=A,T,C or G
  unsure (361): n=A,T,C or G
  unsure (373): n=A,T,C or G
  unsure (483): n=A,T,C or G
caagctttttttttttttttttttttttttttttttgntcaatttcctttaatgagtacttgttacagtaaaagaggtataaagtcctgttcccaagtccaaaccactttttaacttaaatcttgagtttttctgaattactcaatttgaagtaattctctttatatctgaaaaatggttttattgaaacgtttganattaaaaaatatgcattgcaagaagcatatgacaaacattctgagagtacaaaattagttgtaaaaaataacataatttaccagtaaacccactcatatanaaatgtgcaaagccttttgatataaaaagttttgtacaccaagcacctatttttataacttancttcccatgganagataatggcttgcgtgcattttatgtatccataacatacatacaaggctcggtcttttcaatgggataacagttcacaactcttcgatttgaattgtaatgaatctggngacaaggatttttctctaatggattccaaagttagccagaacttttaatgtcaa

SEQ ID NO: 7207 - DNA, 251 bp, Homo sapiens; identical to SEQ ID NO: 4543

SEQ ID NO: 7208 - DNA, 564 bp, Homo sapiens
ctgcaacggagagactcaagatgattccctttttacccatgttttctctactattgctgcttattgttaaccctataaacgccaacaatcattatgacaagatcttggctcatagtcgtatcaggggtcgggaccaaggcccaaatgtctgtgcccttcaacagattttgggcaccaaaaagaaatacttcagcacttgtaagaactggtataaaaagtccatctgtggacagaaaacgactgtgttatatgaatgttgccctggttatatgagaatggaaggaatgaaaggctgcccagcagttttgcccattgaccatgtttatggcactctgggcatcgtgggagccaccacaacgcagcgctattctgacgcctcaaaactgagggaggagatcgagggaaagggatccttcacttactttgcaccgagtaatgaggcttgggacaacttggattctgatatccgtagaggtttggagagcaacgtgaatgttgaattactgaatgctttacatagtcacatgattaataagagaatgttgaccaaggacttaaaaaatg

SEQ ID NO: 7209 - DNA, 556 bp, Homo sapiens
  unsure (529): n=A,T,C or G
ctgaccatagtgctcatgccaagtcctgagcagggcatcttgaatggtggttccctcatgactacacacaccgttagggaatgtttcgttaagaggaaatcaagatgttctaacctgtgaaggtagaatagattccaggctacacaaacacatgaagtgtgccttatattgattactaaagaggttgctgccaagactgcttccaaagggcagaagatagccctaaaaaatgtttgcagtgtggaaatgcatttttaataagtcatattctagtaacaagttgcatttggtaagacacaaagaaacaatgttggtatgcagagtagaaatctctggaagatgatattgtcatatcagagatattgtcagtatcagagatactgaaatctctggaagatgatttttgtctcacatatggcattcacaagtaaaatgccaaactgcaaaattcatattatgtagtacacataggaagatatctaaatatccctgtaggctctgggatgttatttcttattcttaacctccntactagattcacttgtacaatgaaata

SEQ ID NO: 7210 - DNA, 525 bp, Homo sapiens
  unsure (15): n=A,T,C or G
gtcacattccccagngcagataatgggctgctgctggctctgtggtgtctgtctgcagaagatttgctcagtcaaggaaattcaagtggtgagacctttccgccatgggtggtaagagaaacctgccttcaccaaaatctctgaaggggaaggaagtggagagaaaggtttgcttcacttcggggactgcagtttgagaaataaaagggatacagagatatctgcactttgtagaaagggcaagattatttgcttatatctgaagggaggtgggtggttttgctggatgtttggtctgaaagagttacttttgataaagttaatctaattgtagttatattttctgtgtgcttttttttaattactaagaaaaaaattggtgagttcagtagctttggtattatgagtgcaaatcataatagctccaatgtgaaaaaaaaaatcaaaagtataacttgtcacttaatgttagaaaattgcctaaaatgcagtgtaataaataatctctgtaccaaatagtaattt

SEQ ID NO: 7211 - DNA, 321 bp, Homo sapiens
ctgtacgtcagccccttggccttctctgtaggttcttggcagcaatgagcagctttcactcagtgacacaagtaattactgagtcctaatttgatagccaccaactgtacctgggtaggcaaagtcagatttttgagaacctttttcctgatttgaagttttaattaccttattttcttttatgctttcctctgtcttgtaatcttttctcttcttaatatccttccctataatttcaattatttggattaattttagaataaacctatttatttctaaaattaatccaaataattgaaattatagggaaggatattaaga

SEQ ID NO: 7212 - DNA, 553 bp, Homo sapiens
aaaaacactttatttaataaaagttaaacatacaaaactgaaataatacacatcctaaaaattaccttcttccattaataggaagacccttttctatgcatgtatttggcttaaactcaactcaggataactgtgatgatgttcacttacaccaacaaatgcagacaacctgatctaattaacaaaaattacaaacagctaaatgaacataatatacagggaaattatcgtcagattaatgcacaagaaatacaagaaatttttaatgatgaaatattcagtattcttgttcattaatttagccttgtgtttttacaaaaatagtatctacactgtatacagggctatacatcagctttttgttctcccatataaacatcacacatccaaaacatggtaccactgccgtaaatggaaaaaacaaaaaacaggaaaaaagcaaacatacaaaaaacaaaaacaccttagaaaagggagctcatcctaaggtttcttacataaaactaagagtacataaaaataaaacagctagatcaattttagagatggccta

SEQ ID NO: 7213 - DNA, 451 bp, Homo sapiens; identical to SEQ ID NO: 3176

SEQ ID NO: 7214 - DNA, 422 bp, Homo sapiens
cgcgagcgtctgggcgggtggtaggaacaatggcgctgtcttaagtggcacagtggaacagctctgaagatgcaaagatacacgaaaaaacttccagaacatctgggagaatatttaatggaaaatcgcttggttaaaacctgacacttttaacagtgaacagcgttctgagtgtggacgagtagccagtgaagataatgaatgtcgaatgtgactgactagcagcttcattttgaatgagggtcgctgtctgcccattgatagaggccagattgtcttggaagttccaaagttgcaacgatttctggctagtgccacgaggtttacttgactgttgtgtgaaaagctgataagaaaaccatccagaaaaaagctcttcgttttacaaacatgaaaataaaacatgtaattttggaacaaaa

SEQ ID NO: 7215 - DNA, 443 bp, Homo sapiens
  unsure (233): n=A,T,C or G
  unsure (234): n=A,T,C or G
ccaaggctgtttgcatcccggggatccccgtctgctgaccagctaaacaccaatttcttcctgcttttctccacttggtttggaaaatcacacagttttcaggctccatctgtttggagaaaatacattctgaagcatccccaattcaccttctaaaaactcatgtgcaggtttgataaacaccagaacagaagacagtgatgctgtattattttagatttattacatagatnnggaattcacttttttcatgacctagaaaaaaacattccagtgttcaactgttttatattattaaagggcttttaatttgtgaacttctgaaggcatgagtgttttctctttctacttttgtatatgcgcatgttttgtttcctctgacttggtatatgctcatctgagtgacggatatgtgaaatttgtagaactggttagtcaaatgg

SEQ ID NO: 7216 - DNA, 429 bp, Homo sapiens
aaatgctatgtgttaatatttcacttgcttgtattagaaaggcaaaatgtaagactttggtatgtgtgacatatgctttatttggctttattttacaagtacagtatctgcaaaaaacaaagtaaccttttttcatacctgccagttttgaatttatatatgttattgaacaaatagtaatagacgattcgctgttgaaacaagttgtccaagcaatgttatattcatttttatacttattgggaaagtgtgagttaatattggacacattttatcctgatccacagtggagttttagtaattatattttgttgatttcttcattttgttttctggtataaaagtagagataatgtgtagtcacttctgatttagtgaaaccaattgtaataattgtggaaatgttttgtctttaagtgtaaatatttt

SEQ ID NO: 7217 - DNA, 590 bp, Homo sapiens
  unsure (68): n=A,T,C or G
  unsure (537): n=A,T,C or G
aaagtgaaggcatgactgaaactaaaatatttcataaggcttagctagaggcagagtaacgtgttttngttcattgggcttccttgtacttagttttttcatttaataattcaaaccaacacttttaaaaaaataattcagatgagactgagccatatctgcagtaagagaaatatttcttaatgttttggttacttatgatagagtacttttcttgatactgttaactttgtgctttttaaaaaaagtgattctctaacagacctcttaaattgtgacatgaaggtatgtaattagatttcagaaattggtttattagtgaggaatttttatcaataaatgtcatggggcgtgttcttcagaatatatagttattttcaacaaatgccaggctagattcctcacatgtggctatttcttatgtaagaagcttttaactgaagttggcatgtttcgtaaaacttgcgtgtcttttaaaaataataaaaggaagatgagtatttatgaagaatatgtgctgacaacagggcttatgangtctatgtaccttaatctcgtttctccttaccacaatcttaaatagatttcag

SEQ ID NO: 7218 - DNA, 508 bp, Homo sapiens
ctgtatacagacagcaaaagaagcaacattttgttacagcttagcacaaggcatccaacacaaacaggcatgagacaatgcatatttatgtagcattaaaaccagatgaataatatattgtggggcaggaggaggaaaggaggggaaaaaaaaatagaaatgaaagaccaatgtttctcaatgcttccaatatataatgctaaatttcccacctgattgatagcacatccaggtgcttcaaatgtcgtgcattacagtgagaatgttaagaatggaaaatcttatctgtgtacctgcctaatactaagtttggtcaaaacacattttcatagatcttctttcagtgataaatcgatttgaacatcttgtgaagttattgtttaataacttacttaacttaggctttatgctctctagatataaacaatgaattcttttccttttataaaaaaatatgctgcatgttttattaaaagaatatgcaatagttaccaatattaaaggtttt

SEQ ID NO: 7219 - DNA, 317 bp, Homo sapiens
  unsure (14): n=A,T,C or G
  unsure (15): n=A,T,C or G
aaagaaattcaacnntatcctaaaacttgacctggtcaaacttattccatattatattcagttgctctaatatacagcaggttgatactaaaataatgacagaatttggctggtctaaacatacaaatatattttcccccttttctttctttgggaaaataagaaaaaaaacattactctgtttactcagaaagcaaggagagcagcaccttctcctggactccgtgactgtcagccatcttgtcatcacaaaaaggtgaggggtgccaggatttcactatgctgctccttcactggaaagggaaggaaatgctcca

SEQ ID NO: 7220 - DNA, 634 bp, Homo sapiens
  unsure (13): n=A,T,C or G
  unsure (14): n=A,T,C or G
  unsure (15): n=A,T,C or G
aaaatgatgcctnnnatttattgaaagcttaaatgggtgggtgtttctgcacatacctctgcagtacctcaccagggagcattccagtatcatgcagggtcctgtgatctagccaggagcagccattaacctagtgattaatatgggagacattaccatatggaggatggatgcttcactttgtcaagcacctcagttacacattcgccttttctaggattgcatttcccaagtgctattgcaataacagttgatactcattttaggtaccaaaccttttgagttcaactgatcaaaccaaaggaaaagtgttgctagagaaaattggggaaaaggtgaaaaagaaaaaatggtagtaattgagcagaaaaaaattaatttatatatgtattgattggcaaccagatttatctaagtagaactgaattggctaggaaaaaagaaaaactgcatgttaatcattttcctaagctgtccttttgaggcttagtcagtttattgggaaaatgtttaggattattccttgctattagtactcattttatgtatgttacccttcagtaagttctccccattttagttttctaggactgaaaggattcttttctacattatacatgtgtgttgtcatatt

SEQ ID NO: 7221 - DNA, 495 bp, Homo sapiens
  unsure (278): n=A,T,C or G
  unsure (279): n=A,T,C or G
ctgctcccgaggcactagaaaatacagtccaaagtgaagctggtcagatagatgacctggagaaagacattgagaaaagtgtgaatgagattctaggactggcagagtctagcccaaacgaacccaaagcagccaccctggctgttcctccaccagaagatgttcaaccttctgcacagcaactggagctgctagaacttgagatgagggcaagagcgattaaagccctaatgaaagctggtgatataaaaaagccagcctaggtatttaacttgatnntgaattttaggtatgtttgaacaaagccacatcatttaattttgtatctaaaatttatttggggtcttatatgttatttctcatgtaacccttattaggactcattttagccctaaattacctgtggctgtttctttttatttttttgactacttttatattataaatgtgttgtttactgtcttatgaattcatggcaatatagttggatagcct

SEQ ID NO: 7222 - DNA, 410 bp, Homo sapiens; identical to SEQ ID NO: 4733

SEQ ID NO: 7223 - DNA, 195 bp, Homo sapiens
  unsure (184): n=A,T,C or G
attccccaaaaggtgtgtcaggactgagttaatcagtaagctaatagaaacaactgcaatagactagggatgagatttctcaaagcagtctgatataatatgcggcaactccttatgtactggagcgtatccaatacattctcaaaactcctaaattagctaaaatgcaaggtaaagagcagtngaaaaatgcag

SEQ ID NO: 7224 - DNA, 301 bp, Homo sapiens
  unsure (219): n=A,T,C or G
  unsure (244): n=A,T,C or G
  unsure (287): n=A,T,C or G
gtaacccaattatgataattagagagataattctatagtaaattaattcataaatattttctgaaaatagatgatttttcatcacagtaacatttttgaaagtataacaaaattccttcacagtctcctactagtgacaattaactcgttatgtaatgagcccatctaaaacaacaacaacagagaatatctgccatgaatcaaatctcagaaatttanaacctatccaaaaactgggaattgntgcatttctacttttataatcttaaactaccataaaaacgtancattcggtcacagg

SEQ ID NO: 7225 - DNA, 621 bp, Homo sapiens
  unsure (144): n=A,T,C or G
  unsure (145): n=A,T,C or G
  unsure (245): n=A,T,C or G
  unsure (474): n=A,T,C or G
  unsure (517): n=A,T,C or G
  unsure (576): n=A,T,C or G
  unsure (601): n=A,T,C or G
ctggcattccttccacttctctccagccgagcttcccagaacatcacatatcactgcaaaaatagcattgcatacatggatcaggccagtggaaatgtaaagaaggccctgaagctgatggggtcaaatgaaggtgaattcaannctgaaggaaatagcaaattcacctacacagttctggaggatggttgcacgaaacacactggggaatggagcaaaacagtctttgaatatcgaacacgcanggctgtgagactacctattgtagatattgcaccctatgacattggtggtcctgatcaagaatttggtgtggacgttggccctgtttgctttttataaaccaaactctatctgaaatcccaacaaaaaaaatttaactccatatgtgttcctcttgttctaatcttgtcaaccagtgcaagtgaccgacaaaattccagttatttatttccaaaatgtttggaaacagtntaatttgacaaagaaaaatgatacttctctttttttgctgttncaccaaatacaattcaaatgctttttgttttatttttttaccaattccaattttcaaantgtctcaatggtgctataataaatnaacttcaacactctttatga

SEQ ID NO: 7226 - DNA, 643 bp, Homo sapiens
  unsure (628): n=A,T,C or G
aaacagaagagacattcctttttccttgttacatccaaggggggcacaggggtgggtggaaaggaatgtctaaaaatgaaatcccttgatatagagggacctagacggacaggatatgctaaaataatttcaaattctagcacaattttagagtagaataagtcatttttttagactaataaaattaatggctgtcatgttcactctgaaaaaaatctaaatgactgaaatgtacagaaataaaaattagcaaacaattattctagggatattttcagattttacttcatttcttgaaatgcgtgtgccatatgcaattgcatttcttgtgccaagaaactaatagaacttatttcactttacctttttttacctgcccgggcggccgcccgggcaggtctgttctcatacagaaagtaaatcaagacgaaatatggaaaacatttatttcctttccttcaaaatttaacttacattccactttaatagctgttgaaggttaattaaaatgcagcaaagtataactacgttacacaagtgacttcagttattttaatgtgagaaaaatcagactatggtatcttacgagtcattatagaaatgttcatcattaaaaagcatttattangcactgaactgcatg

SEQ ID NO: 7227 - DNA, 332 bp, Homo sapiens; identical to SEQ ID NO: 4110

SEQ ID NO: 7228 - DNA, 506 bp, Homo sapiens
ttttttttttttttttttggccagaaaaagttattttaattttctattaaacattcttctcaaagcattattttatcctatatctcactgaattttaagaaataacattagtattagaaaaactaggaaaaaagataaatgcagataattaaacttacatgaaaaaggaaaattataacaaaggactgagaacgttataaattgaaatgagattataatttgaaaactgcatctgaaagcaaactttattgttcaattattcttaatgatggtgttttatgactaatacactgatttttcaataaggaaacccatgttaaaaatatttttattttaaaaataagcctgtgttcaagctctgatcatatttcttttattttgatttgggaagaaaatactgtttctgatagcatgaaatgcaaaatttttagatttttaatctcactaattttaagaactattgagaaattgattaatgacatgaagtgcacaacactaattactgg

SEQ ID NO: 7229 - DNA, 386 bp, Homo sapiens
  unsure (368): n=A,T,C or G
aaacttgtgataggcatatctatgaaacctttgtaaatttagtttattgctttaccattattttactaggtaaaattagagaacagattttgttctctaatttttaagccttatttacatatgcagaaacagcttaaatattttgactagattagacaaacagttaatagatccaccattaggaatcaatatattatgtcataataaacatcctttttctttcactgaaatttcttttagaaataaacttatttttgcttgttatgttttgaaacttgacataggatattttccctctggctacacattcacctacccttgttctctatttagattattcaaataaagttagtttgcttttatagcanaaaaaaaaaaaaaaaaaa

SEQ ID NO: 7230 - DNA, 654 bp, Homo sapiens
cctgcagcctgcaccaggaggtacaatgtgagactgaggaatgggaagaaggcattccatggagctctgagggcactgggtgcaagggccttgcacatgcaaagaccctgttgtgggttcaagccactgtgtgggagggacaggagagcctggcgtggctgcggccttgaaggaggggactgtgcacacagaattgcaagtgggggtctccgcggaagctcctggcagttttaagcaggattattagatgattcagtcaactttacaactcactttgctgaatggagggtggattaacgagggggtagttggaggctaccccttggagggcattctggacttatctaccaaaatttcaaatgcacataccctctgacccagcagttccacttaagtatttggtcctgaaatcttggtaaaagtgcccaaagatacagaacaaggatgttcactatagcatctcttagaatatggccccaaacaggaagcaaccccaacctctttcatgagggaggtcataaaattcctgcacatgcaacagtgccatcctctgcagcctgtcaaagaggcaggcagcactaactgctggactggatgttctccaagatataataaatgcatttgtttgaaagcagcttgcagcacagtgcgtca

SEQ ID NO: 7231 - DNA, 552 bp, Homo sapiens
ctgaatatactaaacattgctctattatctgttgaattgctgtatttcactttttcagcatttggggatcattatttaattgaatttgtagagatcgattttccagacaggtctctgttcttcaatgaacaaatgataagaaacaatttgactccttatatgacaatggaattaaataaattgacactcatctaggaataattctacaatcatctccatctctaagattacctactgcaaacaaagaattgatctttctttctcaaaaaccacatgggtaagatgatcattgtgactctgaatgcaagaataagtgagtggaagctacaaggggagattatctgccaacatagaaagaatctagaagaaaagattttattacaggtaacatgacatagcttggagccatctttttggtctcttgcatacattttctctgcatgtctaaggaagaattcacaaggtagcaagcaccaatactttctgctttggagtttcacaaattgaaaatttgtccctctcttgttaagtcaatcaaacatctaccaatgg

SEQ ID NO: 7232 - DNA, 481 bp, Homo sapiens
ctggtttcgtgctgacccttagggtgcgtctgttgggttttgttgggctagaaaaatgaaaattttcagatggcgttttcattcctctgactgatattgagctgctttggtgttaaaggtgtaatgtgtacagagttgtatttaacaataataaaagtaacttaagtttgctctatcagattttagttctgcacagaggttaagtgggaaaatgcagctgttgcaaaatgtatataaatagtatgttcatttttttcagtatattatctgatactgtgttagcagcaggtctgcttaaacctagtcttgttgttattgagtcatttcctctcctttgataactagaactgaaagcatttttaacattcttctcctggaagaaatgaattacttgaagcatgaaaagcacaccagggtggttgtttatttagcaattatgactgtagatttaaaaacaagcaaagaaacgacacctcagcag

SEQ ID NO: 7233 - DNA, 294 bp, Homo sapiens; identical to SEQ ID NO: 349

SEQ ID NO: 7234 - DNA, 365 bp, Homo sapiens
  unsure (111): n=A,T,C or G
  unsure (112): n=A,T,C or G
  unsure (210): n=A,T,C or G
  unsure (211): n=A,T,C or G
  unsure (230): n=A,T,C or G
  unsure (312): n=A,T,C or G
tggcctcttacagtatttaagatatagcaaggacatggctgatttttttttataaaaattggcactaataagtgggtttattggtcttttctaattgtataatttaatttnntacaaagtttgtaaaatatcagaggatatatatatattgtttctacgacatggtattgcatttatatctttttactacagtgatctgtgacagcagcnncttcatgttgtattttttntactgaaattgtaaaatatccatcttaaagacatcaactattctaaaaattgtgtacaggatattcctttagtggtggaatnaaaatgtacgaatacttgctttttcaaaaaaatgtattttctgttaaaagttt

SEQ ID NO: 7235 - DNA, 417 bp, Homo sapiens
cctaagatggcattaaagttaaaggattcagggctctctccaagcatagttcagttaatagagttgaaaaataaaagtataggcccttggttggggagatcctggtttccccttctcagcccatgaaggagctgttgcttacagtagaaccaagcttctggaaggaagagagcagtgtggcagagggtgtgtctgtgtgtataggcagtatgctaacaggagacttgagggtaagaaatctagaggctgactttggttctgtttttaggtctttttcatttaactttgacctaagttccttaatttaggaaatgatagctttccacttgacagtctttgaagtctcttccaattttaatatccagatttagagtatgaacatagcttttcttcctgattccagagtttcctgcagac

SEQ ID NO: 7236 - DNA, 495 bp, Homo sapiens
aaaattttttcaaaatctggcttttctatttgagaaaagccctacggtgctctctcggaacccccttttgaaggatgaaacctcaaacttgcttctttaatcagtgggaggctactagaaaaaaaatcttatgttgaggttgctgttcaattccatttttacccaataaaaagtacagaaactatttgatggtgtgcataaatattacactccatgaatagcaaaaatattttttatttataatttacagttgcacagtgaaaaatcgtacatttttacacatacaatttcatttcgttaaatttgcacacatctacagaactttcacacaacaagcacctgaaactctgcaggcagtaggaaatgcaaatactaaaatgtatttattaaccaaatgatagctgaaggccctgcctcagccagacaatttatatagatatgtctatatatacataaaaaaattcttcaccttctagatccaacagcagctttttt

SEQ ID NO: 7237 - DNA, 200 bp, Homo sapiens
aaatggttatgtaagcaaagctgaactgtaaatcttcaggaatatgtattaagattgtggaatgggtgtaagacaattggtagggggtgaaagtgggtttgattaaatggatcttttatggccctatgatctatcctttacttgaaagcttttgaaaagtggaaaggtcattttgttgcatttccccatttcttgttttt

SEQ ID NO: 7238 - DNA, 641 bp, Homo sapiens
  unsure (12): n=A,T,C or G
  unsure (13): n=A,T,C or G
  unsure (14): n=A,T,C or G
aaagtcaattgnnnaccagaagtactgttattttggtgattaaaatccaaaactttagctgtatttcagtaacaaaaacataccttactagactgtgatggctcacacctgtaatcccagtgctttgggaggctgaggtgggaagattctttgagcccaggagttcaaggctgcagtgaattctgatcgcaccactgaactccagcccgtatgacagagtgagaccctgtttctaaaaacaaaacaaacaaacaaacaaacaacgtatcttactgactaaactggaatggaaatcttataattagtgttgtatttttctgcaaaatagtgaattggtacttgggagacttctgttctttgttgaaaaaattgcctttgttttgaaattatatcacctgtgttctgaactaaaatgatgggagttcattttgtatttactttgcagtaagtatcatgtaaatatgcaaatgttgaatgtaatatagattgtgttcctcattgagtttttgggtgatacagtttataaaatataacaattatacaccctcatacatttcgttctgattttgagcttgtaagatgagaactgctttttacacatttaataaaaaaaggtctctgaattatccgaaaaaaaaaaa

SEQ ID NO: 7239 - DNA, 396 bp, Homo sapiens
aaaatagcctttgccatcactgccattaagggtgtgggccgaagatatgctcatgtggtgttgaggaaagcagacattgacctcaccaagagggcgggagaactcactgaggatgaggtggaacatgtgatcaccattatgcagaatccacactagtacaagatgccagcctggttcttgaacagacagaaggatgtaaaggatggaaaatatagccaggtcctagccaatggtctggacaacaagctctgtgaagacctggagcgactgaaaaagattcgggcccgtagagggctgcgtcacttctggggccttcgtgtccgaggccagcacaccaagaccacaggctgccgtggccgcatcgtgggcgtgtctaagaagaagtaagtctgtagg

SEQ ID NO: 7240 - DNA, 108 bp, Homo sapiens
ccttaaccaataggttggaagacaagaccaattgaagagttaggaaatgtgagtttttgttacttctgttattccagtcttggtttcattgtctcattctttattttt

SEQ ID NO: 7241 - DNA, 427 bp, Homo sapiens
  unsure (11): n=A,T,C or G
  unsure (12): n=A,T,C or G
aaagaattcgnntgaaaaaatagatccaatcagtttataccctagttagtgttttgcctcacctaataggctgggagactgaagactcagcccgggtggggctgcagaaaaatgattggccccagtccccttgtttgtcccttctacaggcatgaggaatctgggaggccctgagacagggattgtgcttcattccaatctattgcttcaccatggccttatgaggcaggtgggagatgtttgaatttttctcttccttttagtattcttagttgttcagttgccaaggatccctgatcccattttcctctgacgtccacctcctaccccataggagttagaagttagggtttaggcatcattttgagaatgctgacactttttcagggctgtgattgagtgagggcatgggtaaaaatatttcttt

SEQ ID NO: 7242 - DNA, 626 bp, Homo sapiens
ggagaacagacttgaaaagtttaggaaatcataatgtggcagaggtggtgggaagaagaaagttgagctttttccccttgagaaacttctgcatttagtttctatctttccaggcaaaacaaatgggtattcttttcatacaaccattttcaaatgaaccttagaaaagtcttaacatttaaggtattttatgcacagaatacacttagattgataggaaagaactcgtaatggagtttgagtaaagaaaatgactgatgtactaaacccagtaaaaattgttgaaaatgttaaaggtcagcatgttctaattgggaatctagatatagcttagatttcctattggcttagagtatttgctataacaaatgaagtgcaatgacaattatatattcctactcggtcatactggactggcttcgttctcttaatatactcagtaatgactcaagcctctggctattaacataccctagttgccgttttttaattgccatgagccaaatacttcttggtatacaattgatccatttattttaatggctgccttttcattttcatcttttcttgctgctacccatctatgtatgtattcattggggggaaaatgtagccacattttttat

SEQ ID NO: 7243 - DNA, 143 bp, Homo sapiens
  unsure (4): n=A,T,C or G
  unsure (14): n=A,T,C or G
  unsure (15): n=A,T,C or G
  unsure (46): n=A,T,C or G
  unsure (48): n=A,T,C or G
  unsure (53): n=A,T,C or G
  unsure (65): n=A,T,C or G
  unsure (84): n=A,T,C or G
  unsure (87): n=A,T,C or G
  unsure (94): n=A,T,C or G
  unsure (95): n=A,T,C or G
  unsure (120): n=A,T,C or G
  unsure (127): n=A,T,C or G
  unsure (128): n=A,T,C or G
  unsure (137): n=A,T,C or G
cagnggcaggaagnnataactccagctaagtactacagaaaaaagncncctanatcattactgcnctcagggagccctatgagnacntacacannataatgatacatggggagcagggcnccggggnncgttaaccnagaccg

SEQ ID NO: 7244 - DNA, 142 bp, Homo sapiens
  unsure (20): n=A,T,C or G
  unsure (31): n=A,T,C or G
  unsure (50): n=A,T,C or G
  unsure (54): n=A,T,C or G
  unsure (56): n=A,T,C or G
  unsure (67): n=A,T,C or G
  unsure (70): n=A,T,C or G
  unsure (79): n=A,T,C or G
  unsure (81): n=A,T,C or G
  unsure (86): n=A,T,C or G
  unsure (90): n=A,T,C or G
  unsure (100): n=A,T,C or G
  unsure (105): n=A,T,C or G
  unsure (109): n=A,T,C or G
  unsure (110): n=A,T,C or G
  unsure (116): n=A,T,C or G
  unsure (121): n=A,T,C or G
  unsure (131): n=A,T,C or G
aacgcactgctgccggcagntccgtccctgngtggtggtggtggctaccnattncngacaacttttncancacaacttnanccgtntctnaacttcatancaccnggtnnatcacncatanttttccctangccggacacat

SEQ ID NO: 7245 - DNA, 150 bp, Homo sapiens
  unsure (9): n=A,T,C or G
  unsure (10): n=A,T,C or G
  unsure (24): n=A,T,C or G
  unsure (25): n=A,T,C or G
  unsure (72): n=A,T,C or G
  unsure (73): n=A,T,C or G
  unsure (98): n=A,T,C or G
  unsure (99): n=A,T,C or G
  unsure (108): n=A,T,C or G
  unsure (118): n=A,T,C or G
  unsure (127): n=A,T,C or G
  unsure (134): n=A,T,C or G
  unsure (138): n=A,T,C or G
accgctatnnaggtgacgcgatannccactcaagctatgcatcaagcttggtaccgagctcggaaccattannttcggccgccagggggctggggggnntggaaaaancaggagaaantggcaccgntcctcgngcanggcggcaagctt

SEQ ID NO: 7246 - DNA, 201 bp, Homo sapiens
  unsure (19): n=A,T,C or G
  unsure (22): n=A,T,C or G
  unsure (34): n=A,T,C or G
  unsure (38): n=A,T,C or G
  unsure (50): n=A,T,C or G
  unsure (53): n=A,T,C or G
  unsure (69): n=A,T,C or G
  unsure (72): n=A,T,C or G
  unsure (105): n=A,T,C or G
  unsure (140): n=A,T,C or G
  unsure (145): n=A,T,C or G
  unsure (156): n=A,T,C or G
  unsure (165): n=A,T,C or G
  unsure (177): n=A,T,C or G
  unsure (181): n=A,T,C or G
accccccacagtttgcgcnacnccgccacgtgangganatctgcagaacncangcaagctcgccgtttnatncgaggagcaggggacaatgggagactgagaaanccctgaatgccagcacactggcggccggtactagnggganccgagctcggnaccaagctngaagcatagctngagnattctaacgcgccacctaaa

SEQ ID NO: 7247 - DNA, 185 bp, Homo sapiens
  unsure (21): n=A,T,C or G
  unsure (26): n=A,T,C or G
  unsure (28): n=A,T,C or G
  unsure (39): n=A,T,C or G
  unsure (48): n=A,T,C or G
  unsure (50): n=A,T,C or G
  unsure (64): n=A,T,C or G
  unsure (74): n=A,T,C or G
  unsure (109): n=A,T,C or G
  unsure (115): n=A,T,C or G
  unsure (143): n=A,T,C or G
ggggaaccccccacagtttgngcaancncccgccagcgngaaggacancngcagaaccacgaancccgccgttnctttaggctgcaacaagagacaggggaatttgaanccactnacagaggcacagcaggaagcacactggngagaaaccataccagcgcgactccaaggactgcgaacgaagg

SEQ ID NO: 7248 - DNA, 216 bp, Homo sapiens
  unsure (16): n=A,T,C or G
  unsure (46): n=A,T,C or G
  unsure (54): n=A,T,C or G
  unsure (88): n=A,T,C or G
  unsure (96): n=A,T,C or G
  unsure (123): n=A,T,C or G
  unsure (125): n=A,T,C or G
  unsure (131): n=A,T,C or G
  unsure (133): n=A,T,C or G
  unsure (137): n=A,T,C or G
  unsure (158): n=A,T,C or G
  unsure (161): n=A,T,C or G
  unsure (165): n=A,T,C or G
  unsure (178): n=A,T,C or G
  unsure (186): n=A,T,C or G
  unsure (187): n=A,T,C or G
  unsure (206): n=A,T,C or G
  unsure (209): n=A,T,C or G
  unsure (215): n=A,T,C or G
tccatccctccgtggngggggtggttgcgcactgccggttagcggngcagcacnttttggctccggttctggacttcgcaccgccggntgtatccngataccaggtccctgggggggcccggnancccccncngganccgccgccgccgccgccgcgncgnactnctttataaaacangaaccganntgggggggggcaaaacccnacnaaaaanc

SEQ ID NO: 7249 - DNA, 126 bp, Homo sapiens
  unsure (6): n=A,T,C or G
  unsure (10): n=A,T,C or G
  unsure (24): n=A,T,C or G
  unsure (25): n=A,T,C or G
  unsure (38): n=A,T,C or G
  unsure (46): n=A,T,C or G
  unsure (49): n=A,T,C or G
  unsure (54): n=A,T,C or G
  unsure (61): n=A,T,C or G
  unsure (68): n=A,T,C or G
  unsure (94): n=A,T,C or G
  unsure (99): n=A,T,C or G
  unsure (103): n=A,T,C or G
  unsure (105): n=A,T,C or G
  unsure (123): n=A,T,C or G
cgtggncgcngttcgacgtctgtnnagtgggcttatantctggggnacncgcangacaggnacagatncttttccttgaggcccaaggccacanccctnctcntnttactttcttctccttgnaca

SEQ ID NO: 7250 - DNA, 124 bp, Homo sapiens
  unsure (49): n=A,T,C or G
  unsure (77): n=A,T,C or G
  unsure (90): n=A,T,C or G
  unsure (95): n=A,T,C or G
  unsure (103): n=A,T,C or G
  unsure (109): n=A,T,C or G
  unsure (118): n=A,T,C or G
gggccgaattggggccctctgggatgccatgcctacggaccggctcgcncagtgtgcatgcgcatatacttgccagnaattcggggtctngagangcgggccnacgttnccacccatnaccatt

SEQ ID NO: 7251 - DNA, 165 bp, Homo sapiens
  unsure (1): n=A,T,C or G
  unsure (27): n=A,T,C or G
  unsure (40): n=A,T,C or G
  unsure (63): n=A,T,C or G
  unsure (73): n=A,T,C or G
  unsure (97): n=A,T,C or G
  unsure (106): n=A,T,C or G
  unsure (111): n=A,T,C or G
  unsure (118): n=A,T,C or G
  unsure (119): n=A,T,C or G
  unsure (126): n=A,T,C or G
  unsure (135): n=A,T,C or G
  unsure (138): n=A,T,C or G
  unsure (140): n=A,T,C or G
  unsure (146): n=A,T,C or G
naatgggccaattgggcccttcccgtnaggaccggggccnccggccccaagggatgggttggnaaatgggggnaaataaattcccttggcccaaggnaaaaatttncgccncgccccnnctaaacntcggggtcnggngncgcggnttttaatctttaagcttgg

SEQ ID NO: 7252 - DNA, 246 bp, Homo sapiens
  unsure (5): n=A,T,C or G
  unsure (21): n=A,T,C or G
  unsure (28): n=A,T,C or G
  unsure (37): n=A,T,C or G
  unsure (69): n=A,T,C or G
  unsure (74): n=A,T,C or G
  unsure (82): n=A,T,C or G
  unsure (84): n=A,T,C or G
  unsure (90): n=A,T,C or G
  unsure (99): n=A,T,C or G
  unsure (104): n=A,T,C or G
  unsure (110): n=A,T,C or G
  unsure (123): n=A,T,C or G
  unsure (129): n=A,T,C or G
  unsure (131): n=A,T,C or G
  unsure (140): n=A,T,C or G
  unsure (155): n=A,T,C or G
  unsure (159): n=A,T,C or G
  unsure (165): n=A,T,C or G
  unsure (178): n=A,T,C or G
  unsure (187): n=A,T,C or G
  unsure (212): n=A,T,C or G
  unsure (222): n=A,T,C or G
  unsure (228): n=A,T,C or G
ttggncccattgggcccttcntttaggnccggggccnccggcccccaggttgggttgggaaatgggggnaaatnaatacatngnccaagnaaaattttncgcangccccntctaacgtcgggncggggncnccgtttttntctttaagctggggnaatnccccgnagccgtgcggggntaacccaanagggcgtgtgggggcggttgatatncatgggggtncataangccttggtttcctggtgg

SEQ ID NO: 7253 - DNA, 108 bp, Homo sapiens
  unsure (12): n=A,T,C or G
  unsure (37): n=A,T,C or G
  unsure (46): n=A,T,C or G
  unsure (94): n=A,T,C or G
aatcgccatctngatgcatgctcgagcggccgccagngtgatgganatctgcagaattcgcccttagcggggtctgttgccgaggtcaaagccntcttccaggaacaa

SEQ ID NO: 7254 - DNA, 216 bp, Homo sapiens
  unsure (2): n=A,T,C or G
  unsure (36): n=A,T,C or G
  unsure (61): n=A,T,C or G
  unsure (71): n=A,T,C or G
  unsure (85): n=A,T,C or G
  unsure (87): n=A,T,C or G
  unsure (105): n=A,T,C or G
  unsure (108): n=A,T,C or G
  unsure (110): n=A,T,C or G
  unsure (120): n=A,T,C or G
  unsure (124): n=A,T,C or G
  unsure (128): n=A,T,C or G
  unsure (145): n=A,T,C or G
  unsure (151): n=A,T,C or G
  unsure (168): n=A,T,C or G
  unsure (174): n=A,T,C or G
  unsure (184): n=A,T,C or G
  unsure (186): n=A,T,C or G
  unsure (194): n=A,T,C or G
  unsure (198): n=A,T,C or G
  unsure (213): n=A,T,C or G
tnaaataaaccggaactttcaccttatttagggggnccggaaaaatttgggggggcgcccnttctttaganaatggaccaattgncnttccggaagaccgggacncgncnccaagatggntggnaatngggtattatttccttgnccaagnaaaaattttcccaaagnccaacnaactttgggncngggggggngggngttactttaacaaanaga

SEQ ID NO: 7255 - DNA, 182 bp, Homo sapiens
  unsure (9): n=A,T,C or G
  unsure (11): n=A,T,C or G
  unsure (13): n=A,T,C or G
  unsure (23): n=A,T,C or G
  unsure (30): n=A,T,C or G
  unsure (31): n=A,T,C or G
  unsure (37): n=A,T,C or G
  unsure (46): n=A,T,C or G
  unsure (52): n=A,T,C or G
  unsure (54): n=A,T,C or G
  unsure (57): n=A,T,C or G
  unsure (62): n=A,T,C or G
  unsure (68): n=A,T,C or G
  unsure (74): n=A,T,C or G
  unsure (77): n=A,T,C or G
  unsure (111): n=A,T,C or G
  unsure (114): n=A,T,C or G
  unsure (128): n=A,T,C or G
  unsure (131): n=A,T,C or G
  unsure (142): n=A,T,C or G
  unsure (151): n=A,T,C or G
  unsure (161): n=A,T,C or G
  unsure (167): n=A,T,C or G
  unsure (177): n=A,T,C or G
tagcgtggntngntacaagggcngctgatnnagacanaacggttgntggganangcntcatngaattngaccanggnaagagggtgctgcaggaggtcatgggagcctgantanacctgtacagacanaanggaccctgcancccccgganttcccacctnagacanacccaccccngccca

SEQ ID NO: 7256 - DNA, 207 bp, Homo sapiens
  unsure (3): n=A,T,C or G
  unsure (59): n=A,T,C or G
  unsure (103): n=A,T,C or G
  unsure (109): n=A,T,C or G
  unsure (157): n=A,T,C or G
  unsure (160): n=A,T,C or G
  unsure (166): n=A,T,C or G
  unsure (179): n=A,T,C or G
  unsure (180): n=A,T,C or G
  unsure (185): n=A,T,C or G
  unsure (189): n=A,T,C or G
  unsure (202): n=A,T,C or G
tgnaaatacgaactcactttttagggggacgaaaattggggggcccctcttaagaatgncaatggccttccgaagccggggcccggcccaagtggtggaattntttatnatccttggccaagaaaaatttccgcccccttttaaaccgggggggggnttntttttnttttcaaaaaacnnaaccnttcncatcgccccccanccatg

SEQ ID NO: 7257 - DNA, 117 bp, Homo sapiens
  unsure (29): n=A,T,C or G
  unsure (31): n=A,T,C or G
  unsure (39): n=A,T,C or G
  unsure (61): n=A,T,C or G
  unsure (63): n=A,T,C or G
  unsure (67): n=A,T,C or G
  unsure (90): n=A,T,C or G
  unsure (102): n=A,T,C or G
  unsure (104): n=A,T,C or G
  unsure (108): n=A,T,C or G
aaaaccacccacaatagggaaaacccggncngctagaancaagcccgagcggcccgccagngngatntattatccgcagaaacccccccncaaccggggggntnggtnaaaaggccc

SEQ ID NO: 7258 - DNA, 148 bp, Homo sapiens
  unsure (9): n=A,T,C or G
  unsure (12): n=A,T,C or G
  unsure (20): n=A,T,C or G
  unsure (22): n=A,T,C or G
  unsure (25): n=A,T,C or G
  unsure (33): n=A,T,C or G
  unsure (35): n=A,T,C or G
  unsure (47): n=A,T,C or G
  unsure (50): n=A,T,C or G
  unsure (54): n=A,T,C or G
  unsure (57): n=A,T,C or G
  unsure (69): n=A,T,C or G
  unsure (75): n=A,T,C or G
  unsure (81): n=A,T,C or G
  unsure (87): n=A,T,C or G
  unsure (93): n=A,T,C or G
  unsure (96): n=A,T,C or G
  unsure (97): n=A,T,C or G
  unsure (103): n=A,T,C or G
  unsure (109): n=A,T,C or G
  unsure (127): n=A,T,C or G
  unsure (134): n=A,T,C or G
  unsure (141): n=A,T,C or G
aaagttttnttntgaaaacncncanaatcaaangngttatccatgtnttngcancancaaaaaaacagngacagnggaccntccccntagggnacnnttatcntttggntaaactaattaaataagnggaagtnacccctnatcaatc

SEQ ID NO: 7259 - DNA, 718 bp, Homo sapiens
  unsure (21): n=A,T,C or G
  unsure (207): n=A,T,C or G
  unsure (218): n=A,T,C or G
  unsure (220): n=A,T,C or G
  unsure (234): n=A,T,C or G
  unsure (242): n=A,T,C or G
  unsure (253): n=A,T,C or G
  unsure (308): n=A,T,C or G
  unsure (359): n=A,T,C or G
  unsure (417): n=A,T,C or G
  unsure (433): n=A,T,C or G
  unsure (477): n=A,T,C or G
  unsure (529): n=A,T,C or G
  unsure (551): n=A,T,C or G
  unsure (553): n=A,T,C or G
  unsure (583): n=A,T,C or G
  unsure (602): n=A,T,C or G
  unsure (629): n=A,T,C or G
  unsure (641): n=A,T,C or G
  unsure (667): n=A,T,C or G
  unsure (674): n=A,T,C or G
  unsure (676): n=A,T,C or G
  unsure (685): n=A,T,C or G
  unsure (687): n=A,T,C or G
  unsure (697): n=A,T,C or G
  unsure (701): n=A,T,C or G
  unsure (704): n=A,T,C or G
  unsure (710): n=A,T,C or G
ggccatcgtttttatgtccgnttaagccacactgggcacttagtagaaatgggttgatgtcagttcaattaaagagtgagtaacctctgctgggcccttgctgctcatctgtccacaggatggccggctcctgccagagttcaacatggcggagcctcccttgatcttcgaatgcaaccacgcgtgctcctgctggaggaactgccnaaatcgcgtcntnccaaaatgggcctnagggcaangggtgcagctntaccggacccgggacatgggctggggcgtgcggtccctgcaggacatcccaccangcacctttgtctgcgagtatgtttgggggagcttgatttcagactcagaanccgacgttccagaggaagattcttacctctttgatctcgacaataaggacggggaggnttacttgcatcgaccncgcggttctacgggaacgtcagccggttcatcaaccaccactgngagcccaacctggtgcccgtgcgcgtgttcatggcccaccaggacctgcggnttccccccggatcgccttcttnancaccccccttgatccaaggccggcgaacancttcggggtttgactattngaaaaacgcttcttgggacatcaaaangcaaagcttttnagaactttgcccggggcggcgcttcnaaagggncnaattcccancncactcctggngcgntanctaatnggatcccg

SEQ ID NO: 7260 - DNA, 502 bp, Homo sapiens
  unsure (206): n=A,T,C or G
  unsure (215): n=A,T,C or G
  unsure (216): n=A,T,C or G
  unsure (227): n=A,T,C or G
  unsure (407): n=A,T,C or G
  unsure (408): n=A,T,C or G
  unsure (409): n=A,T,C or G
  unsure (410): n=A,T,C or G
  unsure (411): n=A,T,C or G
  unsure (412): n=A,T,C or G
  unsure (413): n=A,T,C or G
  unsure (414): n=A,T,C or G
  unsure (415): n=A,T,C or G
  unsure (416): n=A,T,C or G
  unsure (417): n=A,T,C or G
  unsure (418): n=A,T,C or G
  unsure (419): n=A,T,C or G
  unsure (420): n=A,T,C or G
  unsure (421): n=A,T,C or G
  unsure (422): n=A,T,C or G
  unsure (423): n=A,T,C or G
  unsure (424): n=A,T,C or G
  unsure (425): n=A,T,C or G
  unsure (426): n=A,T,C or G
  unsure (427): n=A,T,C or G
  unsure (428): n=A,T,C or G
  unsure (429): n=A,T,C or G
  unsure (430): n=A,T,C or G
  unsure (431): n=A,T,C or G
  unsure (432): n=A,T,C or G
  unsure (433): n=A,T,C or G
  unsure (434): n=A,T,C or G
  unsure (435): n=A,T,C or G
  unsure (436): n=A,T,C or G
  unsure (437): n=A,T,C or G
  unsure (438): n=A,T,C or G
  unsure (439): n=A,T,C or G
  unsure (440): n=A,T,C or G
  unsure (441): n=A,T,C or G
  unsure (442): n=A,T,C or G
  unsure (443): n=A,T,C or G
  unsure (444): n=A,T,C or G
  unsure (445): n=A,T,C or G
  unsure (446): n=A,T,C or G
  unsure (447): n=A,T,C or G
  unsure (448): n=A,T,C or G
  unsure (449): n=A,T,C or G
  unsure (450): n=A,T,C or G
  unsure (451): n=A,T,C or G
  unsure (452): n=A,T,C or G
  unsure (453): n=A,T,C or G
  unsure (454): n=A,T,C or G
  unsure (455): n=A,T,C or G
  unsure (456): n=A,T,C or G
  unsure (457): n=A,T,C or G
  unsure (458): n=A,T,C or G
  unsure (459): n=A,T,C or G
  unsure (460): n=A,T,C or G
  unsure (461): n=A,T,C or G
  unsure (462): n=A,T,C or G
  unsure (463): n=A,T,C or G
  unsure (464): n=A,T,C or G
  unsure (465): n=A,T,C or G
  unsure (466): n=A,T,C or G
  unsure (467): n=A,T,C or G
  unsure (468): n=A,T,C or G
  unsure (469): n=A,T,C or G
  unsure (470): n=A,T,C or G
  unsure (471): n=A,T,C or G
  unsure (472): n=A,T,C or G
  unsure (473): n=A,T,C or G
  unsure (474): n=A,T,C or G
  unsure (475): n=A,T,C or G
  unsure (476): n=A,T,C or G
  unsure (477): n=A,T,C or G
  unsure (478): n=A,T,C or G
  unsure (479): n=A,T,C or G
  unsure (480): n=A,T,C or G
  unsure (481): n=A,T,C or G
  unsure (482): n=A,T,C or G
  unsure (483): n=A,T,C or G
  unsure (484): n=A,T,C or G
  unsure (485): n=A,T,C or G
  unsure (486): n=A,T,C or G
  unsure (487): n=A,T,C or G
  unsure (488): n=A,T,C or G
  unsure (489): n=A,T,C or G
  unsure (490): n=A,T,C or G
  unsure (491): n=A,T,C or G
  unsure (492): n=A,T,C or G
  unsure (493): n=A,T,C or G
  unsure (494): n=A,T,C or G
  unsure (495): n=A,T,C or G
  unsure (496): n=A,T,C or G
  unsure (497): n=A,T,C or G
tgagcgaaggaacgagtgagccgagccagtcagcagcattagtgtgatacgtgttgcttttcaattaaagctctctgcctctcggttgagcaactctgagagccggggtccccacccttctgtccccctcatggtgggtcttgtacccaacagcttgccagagcagagagccatgaatagggtttggtttcaggaaagatgaccangagacttannccagagtaagnctgagttcaaatcctggcccacgcttctgcttgtcaccctggcatgtgattcagttcttggttcttgtacatttgggtggaaactgacaactgcctgccatggggagaaccagcttgctgccttctgcaccacggctggcactgatcattagcaggttaaaaaaaaagctttgcaatacnnnnnnnnnnnnnnnnnnnnnnnnnnnnnnnnnnnnnnnnnnnnnnnnnnnnnnnnnnnnnnnnnnnnnnnnnnnnnnnnnnnnnnnnnnnactcg

SEQ ID NO: 7261 - DNA, 142 bp, Homo sapiens
  unsure (121): n=A,T,C or G
  unsure (136): n=A,T,C or G
ccagggcgtgtaatgacttcagtattggcctcgtgttgttggtactcactatccgatccaggcagggaaatggtcagtgcgtgtgtgtcgggtggggtggggggatgagggtggagaggtnccatttcaagaggtntacaga

SEQ ID NO: 7262 - DNA, 116 bp, Homo sapiens
  unsure (29): n=A,T,C or G
  unsure (30): n=A,T,C or G
  unsure (50): n=A,T,C or G
  unsure (60): n=A,T,C or G
  unsure (71): n=A,T,C or G
  unsure (75): n=A,T,C or G
  unsure (85): n=A,T,C or G
  unsure (89): n=A,T,C or G
  unsure (93): n=A,T,C or G
  unsure (111): n=A,T,C or G
  unsure (113): n=A,T,C or G
aaataaaccgcaacctgcaaccttatttnnggggaccggaaaaatttggngggccgcccnttgcgttaganaatngacaaatggncctnccgnaagaccggggctccgacncnaag

SEQ ID NO: 7263 - DNA, 137 bp, Homo sapiens
  unsure (24): n=A,T,C or G
  unsure (25): n=A,T,C or G
  unsure (31): n=A,T,C or G
  unsure (36): n=A,T,C or G
  unsure (55): n=A,T,C or G
  unsure (72): n=A,T,C or G
  unsure (76): n=A,T,C or G
  unsure (83): n=A,T,C or G
  unsure (85): n=A,T,C or G
  unsure (99): n=A,T,C or G
  unsure (100): n=A,T,C or G
  unsure (109): n=A,T,C or G
  unsure (113): n=A,T,C or G
  unsure (116): n=A,T,C or G
  unsure (123): n=A,T,C or G
  unsure (125): n=A,T,C or G
  unsure (131): n=A,T,C or G
  unsure (133): n=A,T,C or G
gacaaggaaaaacgaaggtgaaanncagcanctatncaccatgacctaagagtanacagaggaaacagttanaaanggccagnanacggcagggcgtcnnacccacaantcancanaccctgngncccacnanaacc

SEQ ID NO: 7264 - DNA, 183 bp, Homo sapiens
  unsure (22): n=A,T,C or G
  unsure (31): n=A,T,C or G
  unsure (38): n=A,T,C or G
  unsure (43): n=A,T,C or G
  unsure (77): n=A,T,C or G
  unsure (96): n=A,T,C or G
  unsure (107): n=A,T,C or G
  unsure (108): n=A,T,C or G
  unsure (120): n=A,T,C or G
  unsure (138): n=A,T,C or G
  unsure (145): n=A,T,C or G
  unsure (161): n=A,T,C or G
  unsure (164): n=A,T,C or G
  unsure (168): n=A,T,C or G
  unsure (175): n=A,T,C or G
  unsure (177): n=A,T,C or G
tagccgtggggggtgcctaggnctggaagancaggctnacaanacaaataagcagcaagaaaccggccccaatgacnactgcaaataaaaatcttnttggttttganncccaaccttttnccttggccttccccaaanaactttngggtacctggggggtntangcanggtcctnancttgga

SEQ ID NO: 7265 - DNA, 215 bp, Homo sapiens
  unsure (5): n=A,T,C or G
  unsure (8): n=A,T,C or G
  unsure (12): n=A,T,C or G
  unsure (19): n=A,T,C or G
  unsure (20): n=A,T,C or G
  unsure (29): n=A,T,C or G
  unsure (30): n=A,T,C or G
  unsure (42): n=A,T,C or G
  unsure (45): n=A,T,C or G
  unsure (47): n=A,T,C or G
  unsure (60): n=A,T,C or G
  unsure (74): n=A,T,C or G
  unsure (97): n=A,T,C or G
  unsure (116): n=A,T,C or G
  unsure (156): n=A,T,C or G
  unsure (170): n=A,T,C or G
  unsure (174): n=A,T,C or G
cgtgntgnttgnatcgctnncggcgggcnngaaatggagctnttntnacgtacccctttnaccatcactggacnagtatcttggaaactccattccnatctgtcagatcaacttgnttgggatttgcagtgtgtacttgcttttcagacttgaaantggatcgtgaaatnatgnaaaaacggttcaacccaatctacatagtgtctgtagagaaa

SEQ ID NO: 7266 - DNA, 491 bp, Homo sapiens
  unsure (8): n=A,T,C or G
  unsure (10): n=A,T,C or G
  unsure (11): n=A,T,C or G
  unsure (20): n=A,T,C or G
  unsure (37): n=A,T,C or G
  unsure (84): n=A,T,C or G
  unsure (170): n=A,T,C or G
  unsure (216): n=A,T,C or G
  unsure (246): n=A,T,C or G
  unsure (257): n=A,T,C or G
  unsure (263): n=A,T,C or G
  unsure (271): n=A,T,C or G
  unsure (289): n=A,T,C or G
  unsure (325): n=A,T,C or G
  unsure (336): n=A,T,C or G
  unsure (360): n=A,T,C or G
  unsure (363): n=A,T,C or G
  unsure (367): n=A,T,C or G
  unsure (386): n=A,T,C or G
  unsure (397): n=A,T,C or G
  unsure (398): n=A,T,C or G
  unsure (411): n=A,T,C or G
  unsure (423): n=A,T,C or G
  unsure (426): n=A,T,C or G
  unsure (428): n=A,T,C or G
  unsure (451): n=A,T,C or G
  unsure (458): n=A,T,C or G
  unsure (462): n=A,T,C or G
  unsure (483): n=A,T,C or G
gcgcaggntnnttgaaatcncttcagggcggcgcggnaagagaagctaggatctacagatgctgtagttattctagaaactcanctgctctttactgggacttggcaagtgctaaattttggctcaatattggctaaatattcttggaataagaaatcccctactccagnatgtggaggataaagtttttcatgttctgatgacagggccagaagnattgtgtaggccatcaaggttttattggtnccccaaccccntgaaanaccagggnttagtcctgctaaccagnagagacaacaaccctacccagcttaaaggagcgggntgaggaaaagnattttaaactgatttggactaagnatnttgnactatagtatcacggctgntgctggaccgnngaccatcacgganactcgcggaccntangnaattcacacattgggcgtctagngatcgantcgnccacttgcgatatggataatnttttcttg

SEQ ID NO: 7267 - DNA, 451 bp, Homo sapiens
  unsure (7): n=A,T,C or G
  unsure (8): n=A,T,C or G
  unsure (16): n=A,T,C or G
  unsure (31): n=A,T,C or G
  unsure (76): n=A,T,C or G
  unsure (85): n=A,T,C or G
  unsure (112): n=A,T,C or G
  unsure (122): n=A,T,C or G
  unsure (133): n=A,T,C or G
  unsure (151): n=A,T,C or G
  unsure (157): n=A,T,C or G
  unsure (161): n=A,T,C or G
  unsure (174): n=A,T,C or G
  unsure (198): n=A,T,C or G
  unsure (211): n=A,T,C or G
  unsure (220): n=A,T,C or G
  unsure (228): n=A,T,C or G
  unsure (263): n=A,T,C or G
  unsure (339): n=A,T,C or G
  unsure (378): n=A,T,C or G
  unsure (386): n=A,T,C or G
  unsure (397): n=A,T,C or G
  unsure (399): n=A,T,C or G
  unsure (412): n=A,T,C or G
  unsure (431): n=A,T,C or G
  unsure (443): n=A,T,C or G
atcgctnnggcgggcntgaaattgaacagtngaactttatttgtttgaccaaacaggatcaatcctgattgacatntgggttttnctatatacattgcttctaaggtgtctnattgttctanaagggccaagntggggcatggtatgctgnatccancttnaaggcaggagcgntattaggcagagtaaaacagctgntactggaacccanttctaaaancaaaatanctggtgggtgggcctgtatcccgtctcggaggtgngaggaaatacttgacctggaggagaggtgagtgactgaattgtgcctgtctcagctgagaacagagtgagattctntcacacaaccaaaaagataataggttattactgcccggnggcgtcangggaattcagncncttgggcgtctangatccactcggccacttgngatatggcatantgttcccg

SEQ ID NO: 7268 - DNA, 295 bp, Homo sapiens
  unsure (9): n=A,T,C or G
  unsure (15): n=A,T,C or G
  unsure (30): n=A,T,C or G
  unsure (31): n=A,T,C or G
  unsure (36): n=A,T,C or G
  unsure (64): n=A,T,C or G
  unsure (122): n=A,T,C or G
  unsure (144): n=A,T,C or G
  unsure (173): n=A,T,C or G
  unsure (210): n=A,T,C or G
  unsure (216): n=A,T,C or G
  unsure (222): n=A,T,C or G
  unsure (227): n=A,T,C or G
  unsure (238): n=A,T,C or G
  unsure (260): n=A,T,C or G
  unsure (289): n=A,T,C or G
  unsure (292): n=A,T,C or G
aatggcttntatgcncgcgagggtggtttnnaatcncttcggcgggcaggctgactctggactncctgtaggataggtaaactgtgcggacttgtgtgttgttgaggggtggggctcatccncttacgggtgtttgcttcagcntgccggtccggaaagactataacaacaangggcttgtggttgactctaagacggggaaagataccnggggancttggntactnatctggctganctggtctggtccactctgtatnccaacatcatccccagccctgggcccctngcncgc

SEQ ID NO: 7269 - DNA, 149 bp, Homo sapiens
  unsure (1): n=A,T,C or G
  unsure (2): n=A,T,C or G
  unsure (9): n=A,T,C or G
  unsure (43): n=A,T,C or G
  unsure (58): n=A,T,C or G
  unsure (63): n=A,T,C or G
  unsure (69): n=A,T,C or G
  unsure (85): n=A,T,C or G
  unsure (93): n=A,T,C or G
  unsure (101): n=A,T,C or G
  unsure (125): n=A,T,C or G
  unsure (129): n=A,T,C or G
nnaaaattnacccccaacctttcaacctttatttaaggggggnccggaaaaatttggnccgcncgcccnttccttaagagattgnccaatggnccttccgnaagtccgggtctccgtcaccaagnttgnttggtaatagtgtttttatt

SEQ ID NO: 7270 - DNA, 119 bp, Homo sapiens
  unsure (1): n=A,T,C or G
  unsure (3): n=A,T,C or G
  unsure (4): n=A,T,C or G
  unsure (11): n=A,T,C or G
  unsure (14): n=A,T,C or G
  unsure (39): n=A,T,C or G
  unsure (41): n=A,T,C or G
  unsure (42): n=A,T,C or G
  unsure (51): n=A,T,C or G
  unsure (54): n=A,T,C or G
  unsure (78): n=A,T,C or G
  unsure (80): n=A,T,C or G
  unsure (86): n=A,T,C or G
  unsure (90): n=A,T,C or G
  unsure (94): n=A,T,C or G
  unsure (97): n=A,T,C or G
  unsure (105): n=A,T,C or G
ngnnaaaaatnccncaactttcaacttttttaggggganannaaaaatttngcncgccgcccttgctttagaaatggncnaattgncctnccgnagnccgggacnccgtctccagattg

SEQ ID NO: 7271 - DNA, 143 bp, Homo sapiens
  unsure (22): n=A,T,C or G
  unsure (24): n=A,T,C or G
  unsure (27): n=A,T,C or G
  unsure (33): n=A,T,C or G
  unsure (34): n=A,T,C or G
  unsure (43): n=A,T,C or G
  unsure (45): n=A,T,C or G
  unsure (51): n=A,T,C or G
  unsure (61): n=A,T,C or G
  unsure (63): n=A,T,C or G
  unsure (67): n=A,T,C or G
  unsure (75): n=A,T,C or G
  unsure (103): n=A,T,C or G
  unsure (113): n=A,T,C or G
  unsure (118): n=A,T,C or G
  unsure (129): n=A,T,C or G
ttcaagctgggcctgaacttcngnacntaaggnnatccacccncnttggcntcccaaaagngntggnattatagngaatagccaccatgcccggtgagactcngagattcaanaacanagatgtgattnaaagaaaggggaca

SEQ ID NO: 7272 - DNA, 132 bp, Homo sapiens
  unsure (22): n=A,T,C or G
  unsure (29): n=A,T,C or G
  unsure (42): n=A,T,C or G
  unsure (51): n=A,T,C or G
  unsure (55): n=A,T,C or G
  unsure (72): n=A,T,C or G
  unsure (73): n=A,T,C or G
  unsure (77): n=A,T,C or G
  unsure (84): n=A,T,C or G
  unsure (103): n=A,T,C or G
  unsure (107): n=A,T,C or G
  unsure (112): n=A,T,C or G
  unsure (117): n=A,T,C or G
  unsure (126): n=A,T,C or G
taaattgaatgcccatcaatangtgtctnaaataccactcgnatccttganctantactatatatttggctnntatnattaaantaaacaaagtaaattaccnaggntgacncaganggggctgtnaaacgg

SEQ ID NO: 7273 - DNA, 151 bp, Homo sapiens
  unsure (21): n=A,T,C or G
  unsure (33): n=A,T,C or G
  unsure (37): n=A,T,C or G
  unsure (47): n=A,T,C or G
  unsure (59): n=A,T,C or G
  unsure (69): n=A,T,C or G
  unsure (87): n=A,T,C or G
  unsure (94): n=A,T,C or G
  unsure (102): n=A,T,C or G
  unsure (106): n=A,T,C or G
  unsure (110): n=A,T,C or G
  unsure (122): n=A,T,C or G
  unsure (126): n=A,T,C or G
  unsure (128): n=A,T,C or G
  unsure (134): n=A,T,C or G
  unsure (138): n=A,T,C or G
  unsure (145): n=A,T,C or G
  unsure (149): n=A,T,C or G
ttaaaaatttaaccggcaacnttccaaaccttnattnaagggggggnccggaaaaaatntggggggggnccgccctttctttaaganaaatggnccattggncctncggnaagaccgggacnccgncnccaagntggntcgagantggngc

SEQ ID NO: 7274 - DNA, 775 bp, Homo sapiens
  unsure (494): n=A,T,C or G
  unsure (503): n=A,T,C or G
  unsure (509): n=A,T,C or G
  unsure (554): n=A,T,C or G
  unsure (572): n=A,T,C or G
  unsure (587): n=A,T,C or G
  unsure (600): n=A,T,C or G
  unsure (613): n=A,T,C or G
  unsure (657): n=A,T,C or G
  unsure (683): n=A,T,C or G
  unsure (691): n=A,T,C or G
  unsure (706): n=A,T,C or G
  unsure (726): n=A,T,C or G
  unsure (733): n=A,T,C or G
  unsure (754): n=A,T,C or G
agataaccttcctttggcatgttgctctaaggaacatgaatccaacaggataaagatttcctaaacaaaatgcatgttaagttaatagtgcacaggccctgtgctctgctaacttggaactaacgcataatcagcaaataatcaacaactgctacaatgaaatcaaggtagagaaagggtggaagaatgaaaagaagataataaccaattgcttttttgaaaaatatttttttctttctaaaggcatctcagtggagacttgtgagaaggtaaacaggtgaagcttagtctcacctgtatatagtaaaaagtgcattctgcagcctcagtcaattcatcatctgctgaacaaagacagcaggtcataccatttctcacgcattgctcttagtgcaatcaaaatacctatttttaatggcagcagaaaacattaaggtgatagcatgaagacaaatccaatactactgcagttggcacaattagaaatggcagangaattctgngggggntttatctgaattgttaaaattcatgaataatgctagcaaaagggngtcatcaccaaaactcanggaagtgaagttgtntctcactaccaangaaaaaattgccnttccaaatcctggtggcctttgggctggattttgggacaagttntaacagctttctgcctttttaaactnttgggggncttttccacaggccnttacaaaaataatctggganaaggggngaagaaaaagcctttataaanaggggttaaccttgagggtgg

SEQ ID NO: 7275 - DNA, 665 bp, Homo sapiens
  unsure (517): n=A,T,C or G
  unsure (534): n=A,T,C or G
  unsure (540): n=A,T,C or G
  unsure (580): n=A,T,C or G
  unsure (584): n=A,T,C or G
  unsure (619): n=A,T,C or G
  unsure (634): n=A,T,C or G
  unsure (645): n=A,T,C or G
  unsure (648): n=A,T,C or G
  unsure (662): n=A,T,C or G
ctgagcttccccaaaatcaagggagaatactaaatatctatttaatagaatcttggctttctctcggaggctgcccatccctggtgtgtcccttatcctccctgcagacatttctcatggataggagttccattgaccttgtcttttatgtctcccgggcaattaaacagtctcagtaccctgtacctggattgttcaatgactttcttcccttctcattgacttcactggagtagaaggctaaatataggcattcactctcatatctctcaggtctttccatgcagacagagttgttatcactagtagacggtgcttataagagagacatggaaaagtggaagaatggaaatagggatttggagtggtgctaaaaacaaagaaagaggcttctgaaagctttccatttaatatgatcaaacatagaagacaaaagatgtaacttaatgaccaaggatagggacatagccttgagaaaattacagaagtggaataaacgtcttggactccaaaaaanaaggaatggaaatgtantctgangcactaaagtcaataaaaccctctgatatatttactgtanaaanaaaggacatcttttaattcaaggtttgcaacttangtgactacaggggcnaagcatggaanggnaaagggtaaaaaantaa

SEQ ID NO: 7276 - DNA, 655 bp, Homo sapiens
  unsure (14): n=A,T,C or G
  unsure (26): n=A,T,C or G
  unsure (263): n=A,T,C or G
  unsure (338): n=A,T,C or G
  unsure (451): n=A,T,C or G
  unsure (479): n=A,T,C or G
  unsure (505): n=A,T,C or G
  unsure (547): n=A,T,C or G
  unsure (563): n=A,T,C or G
  unsure (594): n=A,T,C or G
  unsure (595): n=A,T,C or G
  unsure (622): n=A,T,C or G
gtgacttgaagcancttgttgatcanaaaatacagtctctggaagaccgtctggggagcgttctcctacagatgaccaataacactggtgcagagctcagtcccccaggggcagcagccctgccaggagtgtcagggtcaggagatgaacgggtcatgatggaattaaaccacctgaaggacaaagttcaagttgttgaagacatttgcctgctgaacatccagggaaagcctcatggggatggaaggtgccttgccaaacangggaagaccgcgcagtacgcgacagcctgcaccttttgaaatctctcaacgacacgatgcacaggaagtttcaanaaaccgaacaaaccatccagaaacttcaacaggattttagttttctttattctcaattaaaccacacagaaaatgatgtgacttcatcttcaaaaggaaatgagcaattgtanagcaggtgaaaacgcttggcatgggtanggttcacttaaggtgggtgaaccaanaaaggacagtggacaccctgccgtccccccacaccccgtggntcattgctgcagtcanacctcggccgcgaccacgctaaccgaattcnncacactggcggccgtactatggatccnacttcggaccaacttggcggaatatggcgtaaa

SEQ ID NO: 7277 - DNA, 602 bp, Homo sapiens
  unsure (276): n=A,T,C or G
  unsure (277): n=A,T,C or G
  unsure (278): n=A,T,C or G
  unsure (279): n=A,T,C or G
  unsure (280): n=A,T,C or G
  unsure (281): n=A,T,C or G
  unsure (282): n=A,T,C or G
  unsure (283): n=A,T,C or G
  unsure (284): n=A,T,C or G
  unsure (285): n=A,T,C or G
  unsure (286): n=A,T,C or G
  unsure (287): n=A,T,C or G
  unsure (288): n=A,T,C or G
  unsure (289): n=A,T,C or G
  unsure (290): n=A,T,C or G
  unsure (291): n=A,T,C or G
  unsure (292): n=A,T,C or G
  unsure (293): n=A,T,C or G
  unsure (294): n=A,T,C or G
  unsure (295): n=A,T,C or G
  unsure (296): n=A,T,C or G
  unsure (297): n=A,T,C or G
  unsure (298): n=A,T,C or G
  unsure (299): n=A,T,C or G
  unsure (300): n=A,T,C or G
  unsure (301): n=A,T,C or G
  unsure (302): n=A,T,C or G
  unsure (303): n=A,T,C or G
  unsure (304): n=A,T,C or G
  unsure (305): n=A,T,C or G
  unsure (306): n=A,T,C or G
  unsure (307): n=A,T,C or G
  unsure (308): n=A,T,C or G
  unsure (309): n=A,T,C or G
  unsure (310): n=A,T,C or G
  unsure (311): n=A,T,C or G
  unsure (312): n=A,T,C or G
  unsure (313): n=A,T,C or G
  unsure (314): n=A,T,C or G
  unsure (315): n=A,T,C or G
  unsure (316): n=A,T,C or G
  unsure (317): n=A,T,C or G
  unsure (318): n=A,T,C or G
  unsure (319): n=A,T,C or G
  unsure (320): n=A,T,C or G
  unsure (321): n=A,T,C or G
  unsure (322): n=A,T,C or G
  unsure (323): n=A,T,C or G
  unsure (324): n=A,T,C or G
  unsure (325): n=A,T,C or G
  unsure (326): n=A,T,C or G
  unsure (327): n=A,T,C or G
  unsure (328): n=A,T,C or G
  unsure (329): n=A,T,C or G
  unsure (330): n=A,T,C or G
  unsure (331): n=A,T,C or G
  unsure (332): n=A,T,C or G
  unsure (333): n=A,T,C or G
  unsure (334): n=A,T,C or G
  unsure (335): n=A,T,C or G
  unsure (336): n=A,T,C or G
  unsure (337): n=A,T,C or G
  unsure (338): n=A,T,C or G
  unsure (339): n=A,T,C or G
  unsure (340): n=A,T,C or G
  unsure (341): n=A,T,C or G
  unsure (342): n=A,T,C or G
  unsure (343): n=A,T,C or G
  unsure (344): n=A,T,C or G
  unsure (345): n=A,T,C or G
  unsure (346): n=A,T,C or G
  unsure (347): n=A,T,C or G
  unsure (348): n=A,T,C or G
  unsure (349): n=A,T,C or G
  unsure (350): n=A,T,C or G
  unsure (351): n=A,T,C or G
  unsure (352): n=A,T,C or G
  unsure (353): n=A,T,C or G
  unsure (354): n=A,T,C or G
  unsure (355): n=A,T,C or G
  unsure (356): n=A,T,C or G
  unsure (357): n=A,T,C or G
  unsure (358): n=A,T,C or G
  unsure (359): n=A,T,C or G
  unsure (360): n=A,T,C or G
  unsure (361): n=A,T,C or G
  unsure (362): n=A,T,C or G
  unsure (363): n=A,T,C or G
  unsure (364): n=A,T,C or G
  unsure (365): n=A,T,C or G
  unsure (366): n=A,T,C or G
  unsure (367): n=A,T,C or G
  unsure (368): n=A,T,C or G
  unsure (369): n=A,T,C or G
  unsure (370): n=A,T,C or G
  unsure (371): n=A,T,C or G
  unsure (372): n=A,T,C or G
  unsure (373): n=A,T,C or G
  unsure (374): n=A,T,C or G
  unsure (375): n=A,T,C or G
  unsure (376): n=A,T,C or G
  unsure (377): n=A,T,C or G
  unsure (378): n=A,T,C or G
  unsure (379): n=A,T,C or G
  unsure (380): n=A,T,C or G
  unsure (381): n=A,T,C or G
  unsure (382): n=A,T,C or G
  unsure (383): n=A,T,C or G
  unsure (384): n=A,T,C or G
  unsure (385): n=A,T,C or G
  unsure (386): n=A,T,C or G
  unsure (387): n=A,T,C or G
  unsure (388): n=A,T,C or G
  unsure (389): n=A,T,C or G
  unsure (390): n=A,T,C or G
  unsure (391): n=A,T,C or G
  unsure (392): n=A,T,C or G
  unsure (393): n=A,T,C or G
  unsure (394): n=A,T,C or G
  unsure (395): n=A,T,C or G
  unsure (396): n=A,T,C or G
  unsure (424): n=A,T,C or G
  unsure (524): n=A,T,C or G
  unsure (547): n=A,T,C or G
  unsure (549): n=A,T,C or G
  unsure (551): n=A,T,C or G
  unsure (567): n=A,T,C or G
  unsure (578): n=A,T,C or G
  unsure (582): n=A,T,C or G
  unsure (589): n=A,T,C or G
gtatatttggagaaggattaaagggaagaaaataataaaattgcaagaacgtcattaaatgcttaagaggaacatggcttgttcctcagtcttcaaagattgaacaataactgggcagaattttccaaactttgatactagtaacaattaacagcaacccttatggttgccaatataaaatcgagcaataaatcaatcaaatgcttgactcaatcaacttcttgttctttcttgtccataatatagtctagactagctttaatactgctttgaggnnnnnnnnnnnnnnnnnnnnnnnnnnnnnnnnnnnnnnnnnnnnnnnnnnnnnnnnnnnnnnnnnnnnnnnnnnnnnnnnnnnnnnnnnnnnnnnnnnnnnnnnnnnnnnnnnnnnnnnnntttttttttctaattagctgggtatggnggtgcacaccagttcttaagaggccgaggaggctgggcacagtggctcacgcctgtaatcccaatactttgggaggctgaacacctgcccgggcggccgntcgaaagccgaattccacccacntngngccgttctagtggatnccagctcggancaanctggcgnaatcatggcatag

SEQ ID NO: 7278 - DNA, 613 bp, Homo sapiens
  unsure (350): n=A,T,C or G
  unsure (422): n=A,T,C or G
  unsure (451): n=A,T,C or G
  unsure (481): n=A,T,C or G
  unsure (509): n=A,T,C or G
  unsure (530): n=A,T,C or G
  unsure (557): n=A,T,C or G
  unsure (580): n=A,T,C or G
ccttttctcattagtctctgggtcaggcttgggaagatatatgtgttggtgatgatatacttgtctttaatcatgatttatgaagatttaggattgtgtgtgatttgtcaaaggttctgggaaaaggctggtgcatatttcattacttaatctgagattgattttatgatgctaagagatatcacactattgttcaaatgtgtgggaagtacaggtagacacaacatcccagctttttactgcttatctttgcaactgtcaaacaatgctgtaaactttaactgcttgtagttaacaattcctgttttaattataggcagattttttattctgtccaaaggggagaagtntcaatggttatttagctaaaatgcatagcaagacattataactatgacctggtatgaaatcatggacaaagnttggtaaatttcatgggttgggtcatggngaaaatataaaatttcatgggcttgccaanaataatataaaattcccattaaaatggngcaaataccttcggccgcgancaccctaagccgaattccacacactgncgggccgtactaagtggatccanctcgggaccaagctggcgtaatcatgggcatac

SEQ ID NO: 7279 - DNA, 583 bp, Homo sapiens
  unsure (464): n=A,T,C or G
  unsure (466): n=A,T,C or G
  unsure (489): n=A,T,C or G
  unsure (511): n=A,T,C or G
  unsure (531): n=A,T,C or G
ctgatgagtagtagagattggattcacacccaggttttctctctctgaagccctggtcacctgtttggccctggggtgatggggagaaggttctggctgtgtcttggctatctcctgcctctccctctgtggggaatgtgttcgaggatcacagctacagcttttcggataccctttcctttgtgaagcatgtgagaaccaacattgcatctcggcaagaattaaaaaggaattgttgatgacctgctgaaggtattttcattttgttcctggaaatgattaatcttgaggctttgtgatggcctttgtcacaaatagccttccttaatccataattttctcactttcctttaaggtaatattttgcatttaagaaataaaaacaagcaaaataatcctgcttgtgaaggatatgaaatgcagtgtttgtgtgtgggggtgtgtgtgttgtgatgctgaccaangnctaaattccctgaaatgaataanaaaacccctttttaaaataagntcagtttgcctttttttgtnctctattggcaatctaacccctcctttataatatttttccttcttcctctta

SEQ ID NO: 7280 - DNA, 704 bp, Homo sapiens
  unsure (380): n=A,T,C or G
  unsure (612): n=A,T,C or G
  unsure (627): n=A,T,C or G
  unsure (636): n=A,T,C or G
  unsure (646): n=A,T,C or G
  unsure (649): n=A,T,C or G
  unsure (659): n=A,T,C or G
  unsure (665): n=A,T,C or G
  unsure (682): n=A,T,C or G
  unsure (696): n=A,T,C or G
acaaattatctttgaagtttaaacatgataatatatagaaaaagtggtctgaaagtatgaagcccgaagtgtgagtttgatgatgacttagttttgcacatacatgtgagactctgacataccattatatattatcttgatgacacataggcatcaataagattgaaacaatatttgtttaatgtgttttattcagcaccatgcatagtgctattcaaaggtaaatggttaaatggtgtatcattgtaatgagataaagatatagataatcagaccaatttttgaaacatttttacttttaagaacttaattctctcaggaatgagtaactgtttttgctttattttgaatggtctagatatcattctttttctagctgngttgtgaggtacatgttattttaaaaaccccacaggagatgaggaggtcccaagggagtgaggtctcgatgtcccctcaaacattaaccacacagctactcttttgctgtcaagatacaggggctctcaatacattttgtttgaagaaaggacctggatcttataataaccaatcagaaagtaattttctataataaaaagttctttaaaatctgtaagaacagaaatgtgngatttaaaaaatttntgagatatnttaaataacnttnctttaaaaantgatgntggctggcgcagggttncccttaatccaccnttggagcc

SEQ ID NO: 7281 - DNA, 450 bp, Homo sapiens
  unsure (29): n=A,T,C or G
  unsure (51): n=A,T,C or G
  unsure (89): n=A,T,C or G
  unsure (95): n=A,T,C or G
  unsure (254): n=A,T,C or G
  unsure (351): n=A,T,C or G
  unsure (360): n=A,T,C or G
  unsure (417): n=A,T,C or G
  unsure (418): n=A,T,C or G
  unsure (437): n=A,T,C or G
ccacttttggagagtccgactatcacggnaggcacagaactctgccatgtnactagctgaatgacctcggatgtcacttcaactctganccttanaacttgtcaactgcaaagtggggcacttcaccgagctacatcattgagctacttcactgagctacttcattgaattgggaaaattaaaggagcaaatatgggagaaggatttgcccatagtaaacactatgactgtccgcttctgccatctttcagtanacccagtgggaattatatgaaggttgataggcacttaaaccaagaatatatgaacatctattctgtgcaaggatgtgtgcattgaactcagtcccanggacttganggggacaggaaggaagcaaacttggaaatcattgtctttagagatcaaggagcccannagatgaaacaagcctgggntccctaggtgata

SEQ ID NO: 7282 - DNA, 712 bp, Homo sapiens
  unsure (206): n=A,T,C or G
  unsure (366): n=A,T,C or G
  unsure (465): n=A,T,C or G
  unsure (504): n=A,T,C or G
  unsure (508): n=A,T,C or G
  unsure (519): n=A,T,C or G
  unsure (541): n=A,T,C or G
  unsure (542): n=A,T,C or G
  unsure (549): n=A,T,C or G
  unsure (553): n=A,T,C or G
  unsure (554): n=A,T,C or G
  unsure (581): n=A,T,C or G
  unsure (596): n=A,T,C or G
  unsure (618): n=A,T,C or G
  unsure (631): n=A,T,C or G
  unsure (634): n=A,T,C or G
  unsure (639): n=A,T,C or G
  unsure (644): n=A,T,C or G
  unsure (656): n=A,T,C or G
  unsure (660): n=A,T,C or G
  unsure (670): n=A,T,C or G
  unsure (678): n=A,T,C or G
  unsure (697): n=A,T,C or G
  unsure (698): n=A,T,C or G
  unsure (705): n=A,T,C or G
  unsure (712): n=A,T,C or G
atttttgtcaaaatagtaggtgtaaaataatgtcttatggtttttatttgtatttacttgaatacaaataaatacaaggctgaggcttgagattgagattgagattgaggctgagcacctttctaatatttatggggcagttgtgtttccccttccatgaaatgtctgtacatgactttgcccattttaaaaaactgaggatttgnttttattaaaactttggtattatttatcctggatatttcctttataggttatatgtgtcccagtgtgtgacttatctttccctttttgtgatatgttgattaagcagtagttcttaatgaaattgaattagaatttttcttcattttatacttcttgggnctttctaaataaatctttcctaactcagggtataaagatatccctgctatgctttacctaaaagtttcctgaaatcttttgccttatcacccgttatgnaccttggacccatcttccagttgggtttttaatattatngggnatggggaaaangggaaataaatttgcccaatgnncctaacncctnnttttattgggaggaaaccatccctttnccccaggaaaccttnaccaaccgggcccttggggttnaaaataaattttncanaccanaaaantggttaacaaancttntccatttccngggggggnatttctgggtgcgggcccnnaaaaaanaataaan

SEQ ID NO: 7283 - DNA, 694 bp, Homo sapiens
  unsure (10): n=A,T,C or G
  unsure (15): n=A,T,C or G
  unsure (20): n=A,T,C or G
  unsure (37): n=A,T,C or G
  unsure (46): n=A,T,C or G
  unsure (99): n=A,T,C or G
  unsure (113): n=A,T,C or G
  unsure (114): n=A,T,C or G
  unsure (116): n=A,T,C or G
  unsure (124): n=A,T,C or G
  unsure (129): n=A,T,C or G
  unsure (140): n=A,T,C or G
  unsure (162): n=A,T,C or G
  unsure (189): n=A,T,C or G
  unsure (190): n=A,T,C or G
  unsure (201): n=A,T,C or G
  unsure (202): n=A,T,C or G
  unsure (212): n=A,T,C or G
  unsure (258): n=A,T,C or G
  unsure (273): n=A,T,C or G
  unsure (298): n=A,T,C or G
  unsure (304): n=A,T,C or G
  unsure (311): n=A,T,C or G
  unsure (329): n=A,T,C or G
  unsure (390): n=A,T,C or G
  unsure (399): n=A,T,C or G
  unsure (414): n=A,T,C or G
  unsure (416): n=A,T,C or G
  unsure (426): n=A,T,C or G
  unsure (438): n=A,T,C or G
  unsure (457): n=A,T,C or G
  unsure (478): n=A,T,C or G
  unsure (479): n=A,T,C or G
  unsure (497): n=A,T,C or G
  unsure (503): n=A,T,C or G
  unsure (521): n=A,T,C or G
  unsure (526): n=A,T,C or G
  unsure (572): n=A,T,C or G
  unsure (597): n=A,T,C or G
  unsure (602): n=A,T,C or G
  unsure (607): n=A,T,C or G
  unsure (622): n=A,T,C or G
  unsure (663): n=A,T,C or G
  unsure (674): n=A,T,C or G
  unsure (679): n=A,T,C or G
  unsure (683): n=A,T,C or G
  unsure (688): n=A,T,C or G
ctgtggctgnggggncgganaagcacatttttctgcngataattanaatggcttcccccatctctcacggactgtcccaagtctagaaaagaattgacntcctcttctattanncnaataaaanggaanagaatgtttgncttcctttcctttctgtagtgntaagaaaataaacgaacttaatggatnntaaattatcanngagcttaacnctgtactataaaccaaacattaccttttcaaaaagtcctttgaggngaaatattttgtatncgtaatacatagatgcacatataancccacncatatanaatctcaatattttaacncttctttgggtagttgcactaactcactaaccctgaggaaaaagttaacaaattgaaagtnttttcttcnaaagttgagatttancnataaaaggtnttactttgatanctaaaaggaactttattancctcttcctaaaataaacccnncctattctgaaaatggcncttgcnattaccaatttgccattntcaangctaccccttgaggtggacgccttttcttaaaccaaataccccttnttatttattggcagttccccccganagggnccccnaaccccatcttctancacaaccccctccatcaaattacccttccggtaaagctatngcctgctctanccccntttncaccncaatat

SEQ ID NO: 7284 - DNA, 481 bp, Homo sapiens
  unsure (19): n=A,T,C or G
  unsure (34): n=A,T,C or G
  unsure (50): n=A,T,C or G
  unsure (57): n=A,T,C or G
  unsure (73): n=A,T,C or G
  unsure (96): n=A,T,C or G
  unsure (111): n=A,T,C or G
  unsure (117): n=A,T,C or G
  unsure (150): n=A,T,C or G
  unsure (173): n=A,T,C or G
  unsure (188): n=A,T,C or G
  unsure (190): n=A,T,C or G
  unsure (204): n=A,T,C or G
  unsure (221): n=A,T,C or G
  unsure (234): n=A,T,C or G
  unsure (256): n=A,T,C or G
  unsure (265): n=A,T,C or G
  unsure (304): n=A,T,C or G
  unsure (305): n=A,T,C or G
  unsure (329): n=A,T,C or G
  unsure (340): n=A,T,C or G
  unsure (354): n=A,T,C or G
  unsure (364): n=A,T,C or G
  unsure (371): n=A,T,C or G
  unsure (377): n=A,T,C or G
  unsure (379): n=A,T,C or G
  unsure (384): n=A,T,C or G
  unsure (392): n=A,T,C or G
  unsure (398): n=A,T,C or G
  unsure (399): n=A,T,C or G
  unsure (406): n=A,T,C or G
  unsure (415): n=A,T,C or G
  unsure (419): n=A,T,C or G
  unsure (420): n=A,T,C or G
  unsure (430): n=A,T,C or G
  unsure (433): n=A,T,C or G
  unsure (442): n=A,T,C or G
  unsure (446): n=A,T,C or G
  unsure (455): n=A,T,C or G
tctgttggagggggccctncccaaagggtcctgnacccctcacaggggangaactgnacttgccgctcattcngacaaaggggggtgtggacgcanccctggaatatgccnacaccnggacccgctatgccaaggaactgcttgcctggnctgaaaacagagccacctatganctggagtttgctaanancaccatgaagatcnctgaagctggcaaggtntccattcaacagnagagccccatgcctcctgcagnacatctacnccctgtttctggagcaccatctcaccctgggaaccctgnncctccggcccacaccacccctaancccaattccancacactggcgcccntccctatccnatcccancctcgntnccccntctcgccncactcnncgccatngcctcgttncccnnccgacccccnccnctccccccntctnctacgcgcncctacccccaccgcccgccccccccc

SEQ ID NO: 7285 - DNA, 442 bp, Homo sapiens
  unsure (8): n=A,T,C or G
  unsure (10): n=A,T,C or G
  unsure (11): n=A,T,C or G
  unsure (26): n=A,T,C or G
  unsure (207): n=A,T,C or G
  unsure (212): n=A,T,C or G
  unsure (231): n=A,T,C or G
  unsure (237): n=A,T,C or G
  unsure (247): n=A,T,C or G
  unsure (254): n=A,T,C or G
  unsure (286): n=A,T,C or G
  unsure (312): n=A,T,C or G
  unsure (329): n=A,T,C or G
  unsure (332): n=A,T,C or G
  unsure (335): n=A,T,C or G
  unsure (342): n=A,T,C or G
  unsure (360): n=A,T,C or G
  unsure (365): n=A,T,C or G
  unsure (369): n=A,T,C or G
  unsure (370): n=A,T,C or G
  unsure (380): n=A,T,C or G
  unsure (394): n=A,T,C or G
  unsure (399): n=A,T,C or G
  unsure (415): n=A,T,C or G
  unsure (419): n=A,T,C or G
  unsure (421): n=A,T,C or G
  unsure (432): n=A,T,C or G
cctcctcnannggggcagggaacttnaatctgtataagtatctgcagttgctggaataatttgaagaccccatggagctaaggagattaagtggaggattttcattgtttcagaggggcaaggggcaaatccattgctaattctttaatgatgaaaaatggtaagaagttgttaaactcctttggggattttaaaaagtgatacctnaacanaacagagagagagagaganaaatcncactagtgangctaacnaaaataatgataaaaaggttagaacaacccangatacttactggatgcctacacaacntaaaaatatatttatanaanganccactgnaatttgaatataaaaggntatcngaannttaatgtgtngcatctgaaattcnaactntttccttttggctacnccancnaaacacttttnataaccccct

SEQ ID NO: 7286 - DNA, 125 bp, Homo sapiens
  unsure (11): n=A,T,C or G
  unsure (15): n=A,T,C or G
  unsure (47): n=A,T,C or G
  unsure (75): n=A,T,C or G
  unsure (86): n=A,T,C or G
  unsure (98): n=A,T,C or G
  unsure (107): n=A,T,C or G
  unsure (109): n=A,T,C or G
  unsure (121): n=A,T,C or G
ccttttgatangggnttttttaaaaaacaaaattatagaagtttaanaatttaattcaaatttggaggggttttnaggaaattttnacaaaatggctngttggtttnanctgtttcctacntttg

SEQ ID NO: 7287 - DNA, 518 bp, Homo sapiens
  unsure (8): n=A,T,C or G
  unsure (13): n=A,T,C or G
  unsure (21): n=A,T,C or G
  unsure (23): n=A,T,C or G
  unsure (25): n=A,T,C or G
  unsure (167): n=A,T,C or G
  unsure (176): n=A,T,C or G
  unsure (286): n=A,T,C or G
  unsure (352): n=A,T,C or G
  unsure (357): n=A,T,C or G
  unsure (360): n=A,T,C or G
  unsure (377): n=A,T,C or G
  unsure (423): n=A,T,C or G
  unsure (431): n=A,T,C or G
  unsure (456): n=A,T,C or G
  unsure (461): n=A,T,C or G
  unsure (463): n=A,T,C or G
  unsure (499): n=A,T,C or G
  unsure (511): n=A,T,C or G
tctaagancgggngtgttttncntntattttcctaactccatctcctaaaaaattccacctcattctgctcaacccaccacggcattcttgctgttcttgaacatgccaagcaggcccagggcctttgcattcactgtttattttgcttggaatgctctccccccanacaccttcntggcctcccttaccaacctcacatctctgctcccaagtcaccttctagataaagccaacactcatcacactaatgacaactacaacaatccctactgatactcactctanctttttacctgtcacatttgctgtcttctaacatactgcataatttacttatttattctctctccnttatnaanagttctaaaagagaagngacttctatctgttttgttcaaataccccaaggctcccttgttacnttgtcagncagtcaataattatttctcaaatgntaccngntttaagaaatgtgagctgcttttttacgaaaaccancaaatgttcctnccctata

SEQ ID NO: 7288 - DNA, 659 bp, Homo sapiens
  unsure (538): n=A,T,C or G
  unsure (572): n=A,T,C or G
  unsure (584): n=A,T,C or G
  unsure (605): n=A,T,C or G
  unsure (606): n=A,T,C or G
  unsure (608): n=A,T,C or G
  unsure (616): n=A,T,C or G
  unsure (617): n=A,T,C or G
  unsure (624): n=A,T,C or G
  unsure (632): n=A,T,C or G
  unsure (652): n=A,T,C or G
cctatgtcacgggggagagaagctcctgaaccaaccatttgtcaggtctggggacaagactggaagtattgactcatttgcaaggaaactaagtgggtcaacaatgaaagaaggtaataggacctcatctgcaatcctccaatttatctgcaggataaattaaatgcctaaaaaagaaacttattttttaaagtatctgctaccatcaggaaaccaaataaatagtcagtctattaatttcgttcttaaataattccgatcctttacctaatttcttgagccatttaatcatctcaactctaccttagaaccctcccaatgttttccaaatctgtcttactgggaaacaaagattaaaattcctaataaggattattttgtggatcttaatttctagattcccattttaaaattttaattccattaatttcttaataatagcattctattactgattgaatcatctctaataagccatcataatttccagaccatttctaagaacacgagctgatattgaaatgtttactaatgaccngccccgggcggcccgctcaaaacccaattccacncccttggcgccngttctaactgggatcccaacnncngaccccanncttgggnggaaaacnatgggccctaacccctggtnccccggg

SEQ ID NO: 7289 - DNA, 675 bp, Homo sapiens
  unsure (11): n=A,T,C or G
  unsure (13): n=A,T,C or G
  unsure (143): n=A,T,C or G
  unsure (402): n=A,T,C or G
  unsure (464): n=A,T,C or G
  unsure (488): n=A,T,C or G
  unsure (526): n=A,T,C or G
  unsure (538): n=A,T,C or G
  unsure (547): n=A,T,C or G
  unsure (550): n=A,T,C or G
  unsure (557): n=A,T,C or G
  unsure (570): n=A,T,C or G
  unsure (574): n=A,T,C or G
  unsure (581): n=A,T,C or G
  unsure (583): n=A,T,C or G
  unsure (585): n=A,T,C or G
  unsure (594): n=A,T,C or G
  unsure (613): n=A,T,C or G
  unsure (618): n=A,T,C or G
  unsure (647): n=A,T,C or G
  unsure (653): n=A,T,C or G
  unsure (660): n=A,T,C or G
  unsure (663): n=A,T,C or G
  unsure (664): n=A,T,C or G
ccagagcagangngaatggttctgacttaaataggttgttgagcaaggagatctcacattttaaagaatattttcagagggagaatttgagaaggggggagaaaaaaacaaacaggaatgaacataaaagtataaaattctanacaacccactaaaccagttagcaaaaagaggagctcttaattgaaatagagaatttccccaaaaaaaggtctgaatttatttttaaaacattagatttggaaaatacctaatttgaaagtttaattttcatatatacgtcaaacctgcttttagggtagtttagtcaaagctgaaacaaaacaaataaaattctggcttatatatctgatacttgaataaggactctgaaaaaaaatgttcccgttttttttctcgtcngcctaagatatatttttgacattacataaatttcagtgatatgatctggctcctatttaacntttatgccctttctcttccaatgntaacttttaattttctcctcttcttctagctgggatcnttaaaaaaaacngaaaactcngtnctccccnagggtcatggggnaacnttttcancncntttccgggnccctttctattcctttaanaaccnctccccctccctttcctttttaccccccnattggncctttgnccnnaaaccgggggg

SEQ ID NO: 7290 - DNA, 474 bp, Homo sapiens
  unsure (263): n=A,T,C or G
  unsure (466): n=A,T,C or G
ccacctggagacgttgattttgggcctattgaagacacctgctcagtatgacgcttctgagctaaaagcttccatgaaggggctgggaaccgacgaggactctctcattgagatcatctgctccagaaccaaccaggagctgcaggaaattaacagagtctacaaggaaatgtacaagactgatctggagaaggacattatttcggacacatctggtgacttccgcaagctgatggttgccctggcaaagggtagaagagcanaaggatggctctgtcattgattatgaactgattgaccaagatgcttgggatctctatgacgctggagtgaagaggaaaggaactgatgttcccaagtggatcagcatcatgaccgagcggagcgtgccccacctccagaaagtatttgataggtacaagagttacagcccttatgacatgttggaaagcatcaggaaagaggntaaaggag

SEQ ID NO: 7291 - DNA, 208 bp, Homo sapiens
  unsure (4): n=A,T,C or G
  unsure (5): n=A,T,C or G
ccgnnagataaccttcctttggcatgttgctctaaggaacatgaatccaacaggataaagatttcctaaacaaaatgcatgttaagttaatagtgcacaggccctgtgctctgctaacttggaactaacgcataatcagcaaataatcaacaactgctacaatgaaatcaaggtagagaaagggtggaagaatgaaaagaagataata

SEQ ID NO: 7292 - DNA, 261 bp, Homo sapiens
  unsure (1): n=A,T,C or G
  unsure (79): n=A,T,C or G
  unsure (171): n=A,T,C or G
  unsure (178): n=A,T,C or G
  unsure (199): n=A,T,C or G
  unsure (200): n=A,T,C or G
  unsure (234): n=A,T,C or G
  unsure (261): n=A,T,C or G
ngatagactcttcctcagcagcctggcaggcaggaaacagacataggaccccagcccagatctgaatggcatgggaggngctgcccttaaccatgacaccattgtaagagctgtccacatttgtatgttgtgccctggaatcagcctggttgagctcaaatcccaacttanccacgtntggcctgtgtccttgggcagnncacactacctctctgattttggttccttatctgnaaaatggtgatcatcataatacaactn

SEQ ID NO: 7293 - DNA, 184 bp, Homo sapiens
ctgagcttccccaaaatcaagggagaatactaaatatctatttaatagaatcttggctttctctcggaggctgcccatccctggtgtgtcccttatcctccctgcagacatttctcatggataggagttccattgaccttgtcttttatgtctcccgggcaattaaacagtctcagtaccctgt

SEQ ID NO: 7294 - DNA, 204 bp, Homo sapiens
gtttatttagtgtaatgaagataatttgatataaaaatattttgtgtatatatatatatttttactttgttttctaaattgctgtttgcagtaacagtaagcgcaaagcaaaatatataagttatgactgtatgatcagatgaagtatgagttcttttggtttgcatccttaaatagttagagatctctgataaaaactttgga

SEQ ID NO: 7295 - DNA, 180 bp, Homo sapiens
ttattcttccgtggagttaagggctccgtggacatctcaggtcttcagggtcttccatctggaactatataaagttcagaaaacatgtctcgaagatatgactccaggaccactatattttctccagaaggtcgcttataccaagttgaatatgccatggaagctattggacatgcaggc

SEQ ID NO: 7296 - DNA, 308 bp, Homo sapiens
ctgaggggacctgctaggctttgatgaactgagctgcatcttggatttcgcttcctcttctttctcagccgaggttacggtgattagcaagggcagttgctaccactgaaaggatagaaggaaaaaggcaagggaaaatgatacgtactaagatgcacataggagcactcgatagtagtctatggaccgggccctgggtactgccattatagagggaaggggaagaggagtggtaagggagagagaacactggactaagcctcagcattcagatgttcccagttacaacaccctgaacgatctctagg

SEQ ID NO: 7297 - DNA, 242 bp, Homo sapiens; identical to SEQ ID NO: 265

SEQ ID NO: 7298 - DNA, 209 bp, Homo sapiens
ctggaatgccttgatgatgcagaaaaaaaattaaacttggcccagaaatgctttaaaaattgttacggagaaaatcatcagagactggtccacataaaaggaaattgtgggaaagagaaggtactgtttctaagactctacttacttcaagggatccgaaactatcacagtggaaatgatgtagaggcttatgagtatcttaacaaggc

SEQ ID NO: 7299 - DNA, 200 bp, Homo sapiens
ctggttatccgagaagttccgaggattctccttggatttcttagggaaccagttgggatccccagagaagagcccatcatctcgggctactgccagcccacccagattcatcagcgtccgctgcacacaggccatgttctttccttcccagaggtccacagtttggaagatgtcagtggtgttaatgccatagcgctcag

SEQ ID NO: 7300 - DNA, 383 bp, Homo sapiens
tggttatcgaagtggtttactgtaaggctgagaaccatgcattaggcagcattcggcagctatgctgttgtctcttattttttctaacgtggaaatctgttttgtaacttgtagtaataaggtagaaattaaaaagaaaaagtattttcctgtacttgcttggctgcaaggtcaggaacacatagttccttagcggatccttggtaacgctatctgaaaaaccacatcgctgagaaatgagttctggagactctcttaacagtctgttgtccctaggaaggataagagcaagaaacagcaaatgcttttattaccttctcttttccctttaccatttctcactattcaagttttgttaagttcttgatttcccttcagtgcag

SEQ ID NO: 7301 - DNA, 427 bp, Homo sapiens
ccaagcgcttccagcccgacctctccctcccaaccaacgttcaggtggaggtcatcactatcgagagcaccaaaagtggtctgaagtcagagaagttggtggaacagctcactgaatacagcacagacaaggacgagcctccaaaggacgtctttgatgaattatttaagctggctccggagaaagtgaacgcagtgaaagaggccatcgtgaactttgtcaaccagaagctggaccgcctgggcctgtctgtgcagaatctggacacccagtttgcagatggggtcatcttactcttgctgattggacaacttgaaggcttcttcctgcacttaaaggaattctacctcactccgaactctcctgcagaaatgctgcacaacgtcaccctggcgctggagctgctgaaggacgagggcctgctcag

SEQ ID NO: 7302 - DNA, 540 bp, Homo sapiens
  unsure (502): n=A,T,C or G
ccatggcgcttcacgttcccaaggctccgggctttgcccagatgctcaaggagggagcgaaacacttttcaggattagaagaggctgtgtatagaaacatacaagcttgcaaggagcttgcccaaaccattcgtacagcatatggaccaaatggaatgaacaaaatggttatcaaccacttggagaagttgtttgtgacaaacgatgcagcaactattttaagagaactagaagtacagcatcctgctgcaaaaatgattgtaatggcttctcatatgcaagagcaagaagttggagatggcacaaactttgttctggtatttgctggagctctcctggaattagctgaagaacttctgaggattggcctgtcagtttcagaggtcatagaaggttatgaaatagcctgcagaaaagctcatgagattcttcctaatttggtatgttggtctgcaaaaaaccttcgagatattgatgaagtctcatctctacttcgtacctncataatgagtaaacaatatggtaatgaagtatttctgg

SEQ ID NO: 7303 - DNA, 217 bp, Homo sapiens
  unsure (6): n=A,T,C or G
  unsure (187): n=A,T,C or G
ctgtgngttttgccacatgccccacgatgacaatgaccttccctttgaagttctggagcatagcagtgtaagggccctgggtaagctccccttctgcagtgaaggcagcactgaatggaatgttgatgcttcctgaaatgtgaccacgaataaagtcttcactattccggatgtcaaccgccagganctttggtttactggactttgttttcttgct

SEQ ID NO: 7304 - DNA, 316 bp, Homo sapiens
  unsure (244): n=A,T,C or G
tctcagctctcggcgcacggcccagcttccttcaaaatgtctactgttcacgaaatcctgtgcaagctcagcttggagggtgatcactctacacccccaagtgcatatgggtctgtcaaagcctatactaactttgatgctgagcgggatgctttgaacattgaaacagccatcaagaccaaaggtgtggatgaggtcaccattgtcaacattttgaccaacccgcagcaatgcacagagacanggatattgccttcgcctaccagagaaggaccaaaaaggaacttgcatcagcactgaagtcagccttatctgg

SEQ ID NO: 7305 - DNA, 127 bp, Homo sapiens
ataaatttacttgtgtcagaacaaataaaagaaagttggaaatacaaatctatcacttcaaatttaatctgacatgcaattattctgtctattccagaattgtatggcaatttaactgattaagtca

SEQ ID NO: 7306 - DNA, 235 bp, Homo sapiens
ccatgtaaataagatgatttaatgttgattttaatcctgtatataaaataaaaagtcacaatgagtttgggcatatttaatgatgattatggagccttagaggtctttaatcattggttcggctgcttttatgtagtttaggctggaaatggtttcacttgctctttgactgtcagcaagactgaagatggcttttcctggacagctagaaaacacaaaatcttgtaggtcattg

SEQ ID NO: 7307 - DNA, 470 bp, Homo sapiens
  unsure (234): n=A,T,C or G
ctgcgttacatgtaacaaaagatgcaaacaaaatagattcaagttgttttgcagacagcacaatgatacaatattaggactacagaatctcagagtaaaccacaatgatttaaaggtaagatacacagaaataaaatgattttaacagaaaaatatgacattcctgaccttaggtctgggcacatgatgtctgacccctatagaggcaccttggctaaaatgggaatgacctantgccatggctgacctcacttgtgcgttgctgagcccatatgtgaacaaatccccttgatacagcaccatggtaggcatgagaggagaagtgttttaactattctcttatgaattgtaaccaacccttattatctactgatggatggacagggggtggggtgatcatacaggatgggcagacattccaagtactcttcccccagtggtggacggaacagaatctggctacacggtgg

SEQ ID NO: 7308 - DNA, 241 bp, Homo sapiens
ctgagcagcactgaacagtgtccgaacgaaccggtaaatctgcttctgctctgggttgtgtttgtcataatctggtggcacttcggatttcgaaagagggtgaagattttcatcaaaaatatctaagagcatccttccatctgggtccctgtttttgatgtgataatatattgcaagagcgacacatttaattgtatacttgaggtttggttgactgactgtgctatcatctaggaaaatg

SEQ ID NO: 7309 - DNA, 166 bp, Homo sapiens
ggagtggcttcctaacggaaatggaacaggattaccaactagtagacgaaagtgatgctttccatgacaaccttaggtctcttgacaggaatctgccctcagacagccaggacttgggtcaacatggattagaagaggattttatgttataaaagaggattttccc

SEQ ID NO: 7310 - DNA, 483 bp, Homo sapiens
ctgagggctccatgccgaatccatacacaaggtttgtggttctcagaagagttttcagacaggaactgtttccaacttaaaatctttcaacagacaaatggaggtggaagggggatggtttacacaaagtattttcaaatgtaatcaggaaatggaagtgtaaattaaaaccgttttcaacatgtatctcctctttagaaatatcactgcttggagaatgttgtgacaagcaaccaaatactcaaaagaccttatccccagaatactggcaggactcacattactttgcatgtcataattaagaaaaatatccaaatttgatgccatttatagtgtgtcagtcaaaaatgtgtatgctgattttgatgagcaggagaaaggactgggtggtgaggaaacatgactatgcacacatgagacactgtgctgctcacgaaaccgacctccctatggagtgtccaactgaaacctctgatacacacc

SEQ ID NO: 7311 - DNA, 386 bp, Homo sapiens
ccatctgataataaacggaaataatttgatcacatgaaactttggtttgtggtatttatacacagttaaagagaagatataactttttccattactggaaattgttccagcaagcaaacttgacagaatctctcttatttccaatgtaaaatcgtcccatcatgaatttatactttatcactaccaaatttctctgaaatttctcttcagaatttttcccaaggtggaattggctgtgccaggtattaatctgtgccaattgctgtcagcctcatttacttgtactttttctcattataccattaccttgggagcaaggccctctttataatgagtgctatacaaacatgactttgaccagacctttctatctgtccatcttccag

SEQ ID NO: 7312 - DNA, 212 bp, Homo sapiens
cccccaacaaggggacaggacggtcactgtgccaatcctgtcatcaccctcctgtggatgtacaggcagtgctcaataaatgcttcgaggctgatgaggctgctggctcagggtgcgtgggttcctcaaggtggggatttctgagttctaagaccaagtctccatctgagactcccaaattgctccccacctcccatccctgtttttttttg

SEQ ID NO: 7313 - DNA, 230 bp, Homo sapiens
tggtacgcctcctgacttcatcctcaaggtggtaatagacaaacatcctgtccggttttttgtacataagaggccccatgtggatttcttcctggaagtggtgagccagtggtacgagctggtggtgtttacagcaagcatggagatctatggctctgctgtggcagataaactggacaatagcagaagcattcttaagaggagatattacagacagcactgcacttttg

SEQ ID NO: 7314 - DNA, 353 bp, Homo sapiens
  unsure (279): n=A,T,C or G
ccatcggtgctgaaattgagcattttaaatagtacagtaggctggtatacattaggaaatggactgcactggaggcaaatagaaaactaaagaaattagataggctggaaatgcttactttctgctctcattttctttcattttgtctgctgtctttttgaatgccaatactttcatttaaaatgttttgggagcacggcaacccaaaatgactgaaccggtggtccaaaaatccaaacccactgataattacttctcgaggtgataggaaaggcacangaagttaggactttggctgaaatgatgaaaacacatgttcgccattttagggatcaagcgcctcgactcctgcc

SEQ ID NO: 7315 - DNA, 101 bp, Homo sapiens
gggaggaagccgactaggcgaattcacttactgaccggcctgggctgctctgagacatggaggaagccagtgaaggtggaggaaatgatcgtgtgcggaac

SEQ ID NO: 7316 - DNA, 199 bp, Homo sapiens
ctgtcaacctttctttaactgaggaaacatttgagggctctgctgatgttctggctagctacactcaggcaacacatgatgaatcaatgacttatgaagatagaagccaactagatcacatgggctttcacttcacaactgggatccctgctcctagcacagaaacagaattagacgttttacttcccacggcaacatc

SEQ ID NO: 7317 - DNA, 101 bp, Homo sapiens
  unsure (81): n=A,T,C or G
  unsure (99): n=A,T,C or G
  unsure (100): n=A,T,C or G
ggagctttaatttattaatgcagacagtacctaacaaacccacaggtcctaaactaccaaacctgcattaaaaatttcggntggggcgacctcggagcnna

SEQ ID NO: 7318 - DNA, 130 bp, Homo sapiens
ctggcagaccccccaaccacatcagaggagttttcatttcttcctgggctgcttatctgggaagccttcaaagaattcgttacacatcatggcgatgcaggacaggaagacacagtactcttggaagtcc

SEQ ID NO: 7319 - DNA, 101 bp, Homo sapiens
ccttcaaagcctattatttctaacctaagtaaaggccccagtgaaaaacatactggggaaataaaacctctgagaaaaggttcaagcaccttttccaaatt

SEQ ID NO: 7320 - DNA, 101 bp, Homo sapiens
tgatactgtggggattcagtttaggcgctggcccgaggatatcccagcggtggtacttcggagacacctgtctgcatctgactgagcagaacaaatcgtca

SEQ ID NO: 7321 - DNA, 401 bp, Homo sapiens
  unsure (150): n=A,T,C or G
  unsure (227): n=A,T,C or G
  unsure (260): n=A,T,C or G
  unsure (262): n=A,T,C or G
  unsure (278): n=A,T,C or G
  unsure (326): n=A,T,C or G
  unsure (355): n=A,T,C or G
  unsure (382): n=A,T,C or G
ttttttttcattataaaaggtacacttctgtttatatttaaacaacaaagaaaaaagcatctacacacttaaaaaattaattcaatattcctaaatctattttaactcattttaaaatactacatacagaagccagaatgcagagttaanaatggaataaggtggggagaagaaggggaccacgaagaaaaacacttagacaattacttgtctgttgtgggtaaaancaacaggaatcctgggagatacaagaaatcagnancaacctttgctcatanctgatatttttcccctcatgtttgttttttaataacgtccatatgggngctctctgtatgctcccttcctggcctancaggaggggctttcacgacggcctggncccattccagtcgtcctgg

SEQ ID NO: 7322 - DNA, 171 bp, Homo sapiens
  unsure (14): n=A,T,C or G
  unsure (26): n=A,T,C or G
gtgacttgaagcancttgttgatcanaaaatacagtctctggaagaccgtctggggagcgttctcctacagatgaccaataacactggtgcagagctcagtcccccaggggcagcagccctgccaggagtgtcagggtcaggagatgaacgggtcatgatggaattaaacc

SEQ ID NO: 7323 - DNA, 226 bp, Homo sapiens
ctgtgcgtgctcacgggctcctcctgctggaagagagagagatgtgcacgccactcctatggcatgtctagcaggtctgagcagtgttcatagaagaaaaatgttttaacagtctcagattttgggaggtagggggaaaaaaatcattgaaatctgggaaagacatttttaagctgctgacttcacctgcaaaatctaacaggttggattagtttttttttttttt

SEQ ID NO: 7324 - DNA, 228 bp, Homo sapiens
  unsure (222): n=A,T,C or G
  unsure (228): n=A,T,C or G
gagagacgcaggagcctacctgagggaggacgtgtggaaggacagacagcttcaggacaaagcaaaacgagcagaacacaaaaactgcaggggactgcgctgagaatccgggtgaggaaatcatcggcacactgaaccccctactcagaagtttacctatgaaacaatcttgcacatgtatgcttcaaaaacaaataacagttagggaagaaagagagaganagaaan

SEQ ID NO: 7325 - DNA, 111 bp, Homo sapiens
ccaacatggtgaaaccctgtctctactaaaaatacaaaaaagtagccggacatggtggtgggcacctgtaatcccagctactcaggaggctaaggcaggggaatcgcttga

SEQ ID NO: 7326 - DNA, 156 bp, Homo sapiens
gtatatttggagaaggattaaagggaagaaaataataaaattgcaagaacgtcattaaatgcttaagaggaacatggcttgttcctcagtcttcaaagattgaacaataactgggcagaattttccaaactttgatactagtaacaattaacagca

SEQ ID NO: 7327 - DNA, 120 bp, Homo sapiens
tcgacattctttttgttactgatacgtttaattgttttgtttgtaaggttccagaatatcttaaccatgtaagtaaacgcttagaggaagagggagacagagtaatcacttacttggacc

SEQ ID NO: 7328 - DNA, 186 bp, Homo sapiens
ctgagaagaaatggctttggaaagaatggcttcttgcagagccgcagttccagtctgttctccccttggagaagcacttgcaaagcagagtttgaggactcagacaccgaaaccagtagcagtgaaacatcagatgacgatgcctggaagtaggcatataaatgctcacagttaaatctgacccag

SEQ ID NO: 7329 - DNA, 123 bp, Homo sapiens
ccagggccatgacgggcaatgccggggagtggtgcctcatggaaagcgaccccggggtcttcaccgagctcattaaaggattcggttgccgaggagcccaagtagaagaaatatggagtttag

SEQ ID NO: 7330 - DNA, 231 bp, Homo sapiens
ctggtattttgcctaagatctatttaagataaccttttcttatattttttacttaatattgggcataatcgtatcattcaagattaagtctgggttatttctttgataagaactgaatgtggccgggcgcagtggctcacgcctgtaatcccagcactttgggaggccgaggtgggtggatcacaaggtcaggagatcgagaccatcctggctaacacggtgaaacccctg

SEQ ID NO: 7331 - DNA, 171 bp, Homo sapiens
cgcgtggagggaatatgtgttctggaagaatagagatcaaattccaaggacggtggggaacagtgtgtgatgataacttcaacatagatcatgcatctgtcatttgtagacaacttgaatgtggaagtgctgtcagtttctctggttcatctaattttggagaaggctctg

SEQ ID NO: 7332 - DNA, 472 bp, Homo sapiens
  unsure (232): n=A,T,C or G
  unsure (409): n=A,T,C or G
  unsure (425): n=A,T,C or G
  unsure (448): n=A,T,C or G
  unsure (468): n=A,T,C or G
ggagagggtgttttctcgtgtgaatgagggttttatgttgttaatgtggtgggtgagtgagccccattgtgttgtggtaaatatgtagagggagtatagggctgtgactagtatgttgagtcctgtaagtaggagagtgatatttgatcaggagaacgtggttactagcacagagagttctcccagtaggttaatagtggggggtaaggcgaggttagcgaggctttgctanaatcatcaaaaagctattagtgggagtagagtttgaagtccttgagagaggattatgatgcgactgtgagtgcgttccgtagtttgagtttgctaggcagaatagtaatgaggatgtaagcccgtggcgattatgagaatgactgcgcccggtgaagcttcagggggtttggatganaatggctgttactacnagggctatgtggctgattgaaantatgcaatgagcgattttangtct

SEQ ID NO: 7333 - DNA, 364 bp, Homo sapiens
ctgtgtccaagggagcaaagcaccccatattcttctgaacctaaaggggtttcctcctcaaagaagcatgttttcaatccctaaactttggggccagatacagctccaagtggcatttattgctctttggagagtcaaagccaagccaccatgagcacgaaagctgtctgagaccctcctcccctcctccccagcatggagagaataattgccatttcaccctccaaaatccgaaagaagtctcccccttccgtgggtttaagcatggacacaagccaagcaagcctcagatacccaggcctgtttgattgtagctatgttggtgtatctcgtgtacaagatggaaaagtgcttttgttgttct

SEQ ID NO: 7334 - DNA, 101 bp, Homo sapiens
ctgtacttgagattttggcagctcttggaaccggatttgcttgttccagtaaaaatgaaatggctttagtgcaagagttgggtgtacctccagaaaacatt

SEQ ID NO: 7335 - DNA, 380 bp, Homo sapiens
ccaacaacaccagtcaatagaagtcttagtggcacagctacagagagaaatattgactttgaacttgatatacgggttgaaattgatagtggaaaatgtgtactccacccaaccacccttctacaagaacatgatgatataagtttgagaaggagttatgatcgaagttccaggagcttagatcaagattcaccttcaaaaaagaagaagtttcaaactaattatgcttctaccacccatttaatgaccggcaagaaagtgccatcatctctacagacaaagcctagtgacttagaaacaacagtattttacattcccggagttgatgtaaagttgcattacaattccaagacgctaaagactgaatcacctaatgcctc

SEQ ID NO: 7336 - DNA, 221 bp, Homo sapiens
cctgtttgattgtagctatgttggtgtatctcgtgtacaagatggaaaagtgcttttgttgttctacctgatccagttgggggagcaggaatagggggtgcctgcctaacggcctctagcccatgtgcttatactgggatctgtcccgagggatctgcacctggttggcagtcattttgtggtggacgtggtaaatcgcgagtgttaccatgatgaccaag

SEQ ID NO: 7337 - DNA, 132 bp, Homo sapiens; identical to SEQ ID NO: 266

SEQ ID NO: 7338 - DNA, 384 bp, Homo sapiens
  unsure (246): n=A,T,C or G
ctgtttacagaaatatagttgcgagtatacaaatgttccaatagaagcaaaatatctttttaatatttaacaagttatcacagatagctaaaaacatagatgcaaatgaaattcccccagagaacaaactgaaaatatctggtatcagtgctctgaaatcccaactatgaaagccatatacacaaaaatgtaacccttatatcattgcaggacaatggaagaaaggcagttcagtggttgatcagnggctcaagcaaataaaattaaataaaaattaaaaatggcagaatggtagctaaaccacttgagaacaggttaatgaaattattggactatacttaaaacattaagtaaaagaagtgaatgaaactcatttaaagttgc

SEQ ID NO: 7339 - DNA, 190 bp, Homo sapiens
ccaggggaatgatgttccctgcaattaccatctcacctatacgtgcaagaaaggaacagttgcttgcggccagccccctgttgtagaaaatgccaagacctttggaaagatgaaacctcgttatgaaatcaactccctgattagataccactgcaaagatggtttcattcaacgtcaccttccaactatc

SEQ ID NO: 7340 - DNA, 215 bp, Homo sapiens
ctgactttcatatgagactcgggcttgatgtatgttagtgttctctttcttctaatagaatttctcattattggggtttaaatctttcctaaaatatttatagagtatggtttttagttttattatttttgtattcaaagacaaattaatcaaataggtttatattttacatgtgtacttcgtactcttatttgagatgggtaaaagtctgggtc

SEQ ID NO: 7341 - DNA, 130 bp, Homo sapiens
cttggaaagtggatctggaaaagtaacattccctaaaatgaagatccccaaatttaccttctctggccgtgagctggttggcagagaaatgggggtggatgttcacttccctaaagcagaggccagcatc

SEQ ID NO: 7342 - DNA, 268 bp, Homo sapiens
  unsure (4): n=A,T,C or G
  unsure (65): n=A,T,C or G
  unsure (68): n=A,T,C or G
  unsure (110): n=A,T,C or G
ccanaattcttggagtttacagaattggttataagaactctcagaacaacactgagaagaagttnganctccttgtcatggaaaatcttttctacgggagaaagatggcncaggtttttgatttgaagggctctcttaggaatcggaatgtaaaaactgacactggaaaagagagttgtgatgtggtcctgctagatgaaaatctcctaaagatggttcgagacaaccctctatatattcgttctcattccaaagctgtgctgagaac

SEQ ID NO: 7343 - DNA, 214 bp, Homo sapiens
gttttattttattataatgaattttgtttgttgatgtgaaacattatgccttaagtaatgttaattcttatttaagttattgatgttttaagtttatctttcatggtactagtgttttttagatacagagacttggggaaattgcttttcctcttgaaccacagttctacccctgggatgttttgagggtctttgcaagaatcattaatacaaa

SEQ ID NO: 7344 - DNA, 281 bp, Homo sapiens
ccaacttcttggcccagacagaggccctgatgaggggaaaatcgacggaggaggcccgaaaggagctccaggctgcgggcaagagtccagaggaccttgagaggctgctgccacataaggtctttgaaggaaatcgcccaaccaactctattgtgttcaccaagctcacaccattcatgcttggagccttggtcgccatgtatgagcacaagatcttcgttcagggcatcatctgggacatcaacagctttgaccagtggggagtggagctgggaaagcag

SEQ ID NO: 7345 - DNA, 408 bp, Homo sapiens
cctagaaggaaacctccagatgcctggaattaagtcctctggatgtgatgtgaacctgccaggcgtgaatgtgaaactcccaactgggcagatttctgggcctgaaatcaaaggtggtctgaaaggttcagaagtaggtttccatggggctgctcctgatatcagtgtgaaggggcctgcctttaatatggcatctcctgagtcagattttggcatcaacttgaagggcccaaaaatcaaaggaggtgcggatgtttcagggggtgtcagtgccccagacatcagccttggtgaagggcatttgagtgttaaaggttccggggggtgagtggaagggaccccaagtctcctctgctctcaacttggacacatctaagtttgctgggggcctttaacactcaaatgccc

SEQ ID NO: 7346 - DNA, 255 bp, Homo sapiens
acaaattcatgaaatttgcagacaacaacaacaacaaaacagctcctcaagtcaggtgacagtaatgcccctctcttgcaaagagaacaaactgtcattagtgtaacatgaagagctggctttccagtgaattttactaataaggaaacacaaaaggttacagacttgagtgaaactactcaaggaacataaaagctaaaagccaactgataagtatgtcttcacacatttctcaggtgaatggactctttgaca

SEQ ID NO: 7347 - DNA, 429 bp, Homo sapiens
  unsure (350): n=A,T,C or G
  unsure (422): n=A,T,C or G
ccttttctcattagtctctgggtcaggcttgggaagatatatgtgttggtgatgatatacttgtctttaatcatgatttatgaagatttaggattgtgtgtgatttgtcaaaggttctgggaaaaggctggtgcatatttcattacttaatctgagattgattttatgatgctaagagatatcacactattgttcaaatgtgtgggaagtacaggtagacacaacatcccagctttttactgcttatctttgcaactgtcaaacaatgctgtaaactttaactgcttgtagttaacaattcctgttttaattataggcagattttttattctgtccaaaggggagaagtntcaatggttatttagctaaaatgcatagcaagacattataactatgacctggtatgaaatcatggacaaagnttggtaa

SEQ ID NO: 7348 - DNA, 209 bp, Homo sapiens
ctgatgagtagtagagattggattcacacccaggttttctctctctgaagccctggtcacctgtttggccctggggtgatggggagaaggttctggctgtgtcttggctatctcctgcctctccctctgtggggaatgtgttcgaggatcacagctacagcttttcggataccctttcctttgtgaagcatgtgagaaccaacattgca

SEQ ID NO: 7349 - DNA, 372 bp, Homo sapiens
  unsure (9): n=A,T,C or G
cctgatctncaggtgccctggagggtccgactgctttcctcaggtactgactgtggacagcacatgagtacaggatgtagagtgcgcaggccagggcatagcctccccagttagaaacaccagcaatgacggcaaagtcagcctccacgtcgcaggcgatgacatccccgtgccgtatgtgcctcctcacagcctccttgactttacccatcccaagctcgttgcctccatcaccgactccagttgatgagattccaggaatcttcttcgcagcaagaaaaagatcgtcaatggggtcaaccaagtgcttgatgttcatcttccttgcattgtagtaattgccatcagcagctcttccggcacgctctatgg

SEQ ID NO: 7350 - DNA, 108 bp, Homo sapiens; identical to SEQ ID NO: 267

SEQ ID NO: 7351 - DNA, 393 bp, Homo sapiens
ccttaacccttgccctgggagcccccaaggataataacatccctttctggggcaacaaaactgggaccgagtgggtaactgatatttgacaggggaacctaaacagtctacggaagtgtcctgagatgggcgtaaagtcaaacagaccaagcacacaggtaacactgaaataggaaagagtaagagcttctgttcaggctggaggtgctcgtatggtgggacaggaaagggggaaaagagaaaggggcaacatggcagacataccacggttcctacagagattaggggcagccctggcccgggaagtacacagggcagagagctgactctcaggccaggaaggagtttagctctgacccatcctcagggaccacggctctcccccagcctcag

SEQ ID NO: 7352 - DNA, 208 bp, Homo sapiens
aaaaaactctggaacccatatccaggcttggtgaggttgctgccaacagtcctggcctcccccatccctaggctaaagagccatgagtcctggaggaggagaggacccctcccaaaggactggagacaaaaccctctgcttccttgggtccctccaagactccctggggcccaactgtgttgctccacccggacccatctctcccttc

SEQ ID NO: 7353 - DNA, 414 bp, Homo sapiens; identical to SEQ ID NO: 268

SEQ ID NO: 7354 - DNA, 461 bp, Homo sapiens; identical to SEQ ID NO: 269

SEQ ID NO: 7355 - DNA, 101 bp, Homo sapiens
ctcctcagcgcttcttctttcttggtttgatcctgactgctgtcatggcgtgccctctggagaaggccctggatgtgatggtgtccaccttccacaagtac

SEQ ID NO: 7356 - DNA, 125 bp, Homo sapiens
ccaagaacctcttccaccggaccatttctgagagtggcgtggccctcacttctgttctggtgaagaaaggtgatgtcaagcccttggctgagcaaattgctatcactgctgggtgcaaaaccacc

SEQ ID NO: 7357 - DNA, 238 bp, Homo sapiens
cctttggcgctcgttaggacagtggactattcagcaacaaaaaacccaagacgaaatgaaagaaaatatcatatttctgaaatgtcctgtgcctccaactcaagagcttctagatcaaaagaaacagtttgaaaaatgtggtttgcaggttctaaaggtggagaagatagacaatgaggtccttatggctgcctttcaaagaaagaagaaaatgatgggaagaaaaactgcacaggca

SEQ ID NO: 7358 - DNA, 153 bp, Homo sapiens
ctggagaatttctctacaaaaagctcttcagtcgtagagatccagaggaggatggaatgatgaaaagaagaggaagacaaggtccaaatgccaaccttgttaagacattggtttttttctttctagaaagtgagttacatgagcatgcagcat

SEQ ID NO: 7359 - DNA, 339 bp, Homo sapiens
ctgaatgtcagcaattgtttcagaggtgctcacaacttcaatgaggccagagcgatctcctgttgctaaacagccataaggcaacatccgaagatccaaaccagcttctttccagagtaaatccatcaagcgcaacatttggagtgtcaacatatcctgtcgtaaatcatcaccatttttaaaaatcactccaactgaatcctcaccaaataccttgttattgtataccagccacaaaggcttcattttggaatccatgtatttgcacttttcaacatagagttctgagaggataacacatgggttcaggggtgactgcaggtcagagagggcttcccg

SEQ ID NO: 7360 - DNA, 154 bp, Homo sapiens
cctggctcaacaaaagggctggggattggccctgaaaggagagagctgactgtcctggctgatggacaggagatcctcttagcactaccctaaggcaggcagttgggcattggtgtagacaacaggaaagtccaggctatagccgtactcaaaa

SEQ ID NO: 7361 - DNA, 125 bp, Homo sapiens
  unsure (1): n=A,T,C or G
  unsure (2): n=A,T,C or G
  unsure (14): n=A,T,C or G
  unsure (25): n=A,T,C or G
  unsure (35): n=A,T,C or G
  unsure (99): n=A,T,C or G
  unsure (102): n=A,T,C or G
  unsure (106): n=A,T,C or G
  unsure (113): n=A,T,C or G
nngcgacggcaccntcatccacctnaagtacccgntaaacctagccccaaacccactccaccttactaccagacaaccttagccaaaccatttacccanatnaagnataggcnatagaaattgaa

SEQ ID NO: 7362 - DNA, 101 bp, Homo sapiens
  unsure (13): n=A,T,C or G
  unsure (18): n=A,T,C or G
gaggtctgagggnaattntttaactaaacatcagtacacaaaaaataccaggatagatggaatcaaaagactctgaagccaaaaggaggctagggagagca

SEQ ID NO: 7363 - DNA, 101 bp, Homo sapiens
  unsure (8): n=A,T,C or G
  unsure (99): n=A,T,C or G
  unsure (100): n=A,T,C or G
ctgggggnggctacatgactctgaaccccagggcacctactgacgatgataaaaacatctacctgactcttcctcccaacgaccatgtcaacagtaatnnc

SEQ ID NO: 7364 - DNA, 174 bp, Homo sapiens
ctgacagataataggcaggacatgttagttataaagtagttacagcctaattcacaaaagttaccaactgtttctctttctagaaagaagcaagaagttaagaaattccttgaattagcgcctggtgtgtcaggtgggagtgcagaggagggctgttagagcagtgtcaaaagg

SEQ ID NO: 7365 - DNA, 167 bp, Homo sapiens
ccataccatagatttgggatgatgtagtctgtgctaaatattttgctgaagaagcagtttctcagacacaacatctcagaattttaatttttagaaattcatgggaaattggattttgtaataatcttttgatgttttaaacattggttccctagtcaccatagtta

SEQ ID NO: 7366 - DNA, 118 bp, Homo sapiens
  unsure (10): n=A,T,C or G
  unsure (27): n=A,T,C or G
ccatgctggncttgaactcctgacctnagatgatccgcctgcctcagcttcccaaagtgctgggatttgctaagtgtgagccactgtgcccggcctcttattcatttcttaacctatg

SEQ ID NO: 7367 - DNA, 376 bp, Homo sapiens
ccatcaactggaactatgtcattatttataaaacaggagcaatcacagggctgtggtgagaatcacatgaggtgacacatgtgaaatggtcctttcccctaagacatatataattgtgacaaggaacaaaatttacatagaaaataattacagaacaacgtaggaccatgtcttcatttctccctggagcggatgtaaaataaggtgattgatttgagcaacatgttatgaatatttagaaatgtcttctagggaagcaagctggcgctcaccgattttggtttgccaggcatatcagaaggcactttgtgacaggtgcagtagggacgcggagtgatctcttcacgtgtaggcaatgcccagcccgacacctagg

SEQ ID NO: 7368 - DNA, 128 bp, Homo sapiens
acaaattatctttgaagtttaaacatgataatatatagaaaaagtggtctgaaagtatgaagcccgaagtgtgagtttgatgatgacttagttttgcacatacatgtgagactctgacataccattat

SEQ ID NO: 7369 - DNA, 376 bp, Homo sapiens
  unsure (209): n=A,T,C or G
  unsure (374): n=A,T,C or G
cctggacttcccctgccccatgcaataaagcaagttttatatacactccccatatttttttctaacattttcttatataaatttaaatattttacaaaaaaaggcttttttcctccaaacatataaatctgagtgaaacatagattccccacccgagaacttgtttcttcactaaaatataaatgttgtctgatattaagggtaaatgncttttgacccactggagatcactgaagtctgaattgcaccgtggagaagcacttgtgttttctgaggtctccagcaagtataagccgaattccagcacactggcggccgttactagtggatccgagctcggtaccaagcttgggcgtaatcatggtcatagctgntt

SEQ ID NO: 7370 - DNA, 127 bp, Homo sapiens
ctgatcttaaactcctgacctcaagcagtctacccccgttggcctcccaaagtgctgggattacaggtgtgagccactgcacccagccaagtttatgtatttttattctttttcatgaatgtgattt

SEQ ID NO: 7371 - DNA, 212 bp, Homo sapiens
ctgtcgtatttgggccacatgctgccgcacagcctcctgcaaatgcagtatgctgctgcgttgctcctctggattgctagagatctcaagctggaacctgacccgttgcttcttctcactatgttccttccgcttaggttctacatggagcagcaggttgttgacaatgtccaggatcatggcatactgagctgggttggtggaaaatttcc

SEQ ID NO: 7372 - DNA, 202 bp, Homo sapiens
ccttgttataaataagctgcataatcaataaatagaacaagggactttttgttgatattccaaatactcaaagtttacgtaatgaaaattatagcgtgtgtgcaaactcttgagggttgattatgctgcaatttagcatgttggaacgtctagggagaaggttgactttttgcacttctgtatatagtcaaaagagagaaac

SEQ ID NO: 7373 - DNA, 206 bp, Homo sapiens
  unsure (6): n=A,T,C or G
gttagngcaagtacagtctctcaaggagaattgattttgtggcacaaaaagggaacatgttttactctttgcacgaaactttcattgttaatgtatattattcagaaacattgtattgtaccataaaacttgtattatcaaactgttggatgttcatgtgtttgaacttttgcgcaccggatagaccccttgtatataaagtggtg

SEQ ID NO: 7374 - DNA, 101 bp, Homo sapiens; identical to SEQ ID NO: 426
  unsure (85): n=A,T,C or G
  unsure (90): n=A,T,C or G

SEQ ID NO: 7375 - DNA, 101 bp, Homo sapiens
  unsure (4): n=A,T,C or G
  unsure (12): n=A,T,C or G
cctnctatgggngttaaattttttactctctctacaaggttttttcctagtgtccaaagagctgttcctctttggactaacagttaaatttacaaggggat

SEQ ID NO: 7376 - DNA, 181 bp, Homo sapiens
tttggctggttgattccaatgcagttgatgagctatccactctccgaagggcaactggaccagaagacagccatgtcactcctgtggaagtcctatccccttgtttgcattgctaaggaactgattccagaagccactgagaaatacttaggaggaacagacgacactgtcaaaaagaaag

SEQ ID NO: 7377 - DNA, 101 bp, Homo sapiens
gaagagcggagcgtgtgagcagtactgcggcctcctctcctctcctaacctcgctctcgcggcctacctttacccgcccgcctgctcggcgaccagaacac

SEQ ID NO: 7378 - DNA, 193 bp, Homo sapiens
  unsure (1): n=A,T,C or G
  unsure (91): n=A,T,C or G
  unsure (154): n=A,T,C or G
  unsure (192): n=A,T,C or G
ngtccaacattgcgaaaccctgtctctactaaaaaaaaaataaaaaatacaaaaattagctgggtatgatggcacatgcctctaatcccanctactgggaggctgaggcatgaaaatcgcttaaacctgggaggcgggtttgcagtgagccaanatagcaccactgcactccagcctgggtaacaaattgana

SEQ ID NO: 7379 - DNA, 116 bp, Homo sapiens
aaaagtcttgtgatttcctctcatcttttagagattcctgccaaaaattctaccaagcagagatggaggagcttgactttatcagcgccgtagagaagtccagaaaacacataaac

SEQ ID NO: 7380 - DNA, 351 bp, Homo sapiens
  unsure (20): n=A,T,C or G
  unsure (175): n=A,T,C or G
  unsure (183): n=A,T,C or G
  unsure (184): n=A,T,C or G
ccacatcaatgtcatacagnttcttcacagcctgtttaatctggtgcttgttggctttaacatccacaatgaacacaagtgtgttgttgtcttctatcttcttcatggcagactcagtggtcagcggaaacttgatgatagcatagtggtcaagcttgtttctcctgggagagcnctttccgnngatatttgggctgtctccggagtcgcagtgtcttcggccgccggaaggtgggtgacgtgcggatcttcttctttttgtggctgtggacacctttcaacactgccttcttggcctttaaagccttcgctttggcttcagctttaggaggggcaggagcttccttcttc

SEQ ID NO: 7381 - DNA, 327 bp, Homo sapiens
  unsure (6): n=A,T,C or G
  unsure (221): n=A,T,C or G
  unsure (225): n=A,T,C or G
  unsure (260): n=A,T,C or G
  unsure (320): n=A,T,C or G
ctgcanaggccacctggattgtgcctaatgtgtttgagcatcgcttaggagaagtcttctatttatttatttattcattagttttgaagattctatgttaatattttaggtgtaaaataattaagggtatgattaactctacctgcacactgtcctattatattcattctttttgaaatgtcaaccccaagttagttcaatctggattcatatttaatttngaangtagaatgttttcaaatgttctccagtcattatgntaatatttctgaaggagcctgcaacatgccagccactgtgatagaggctgcggatccaancaaatgg

SEQ ID NO: 7382 - DNA, 348 bp, Homo sapiens
  unsure (29): n=A,T,C or G
  unsure (51): n=A,T,C or G
  unsure (89): n=A,T,C or G
  unsure (95): n=A,T,C or G
  unsure (254): n=A,T,C or G
ccacttttggagagtccgactatcacggnaggcacagaactctgccatgtnactagctgaatgacctcggatgtcacttcaactctganccttanaacttgtcaactgcaaagtggggcacttcaccgagctacatcattgagctacttcactgagctacttcattgaattgggaaaattaaaggagcaaatatgggagaaggatttgcccatagtaaacactatgactgtccgcttctgccatctttcagtanacccagtgggaattatatgaaggttgataggcacttaaaccaagaatatatgaacatctattctgtgcaaggatgtgtgcattgaactcagtcc

SEQ ID NO: 7383 - DNA, 325 bp, Homo sapiens
ctgaggttgtcagtacaatgaaaccaaactggcgggatggaagcagattattctgccatttttccaggtctttgagttgcacgtcaaatctggggctgatcaccccacacttgtttagcctgcctgtgaggttcacaacaattttcccagctctgtggtcatcaatgatttcaaattcgccaatgtaaccatgcttcatcatcacagtgagaaacccggacgatgactttggagcacggcctaataagcacctggcgtttgcctctcttttcggcattgttgatactcttgagagcatctgccaggacattcatgcgcaccattg

SEQ ID NO: 7384 - DNA, 393 bp, Homo sapiens
ccttggatgcagatcaatgctccaataaagttcattatcagctcctcctgccttgtgacaggatgatttgattttacaaaagtccctttgaaaacaagagtaaacgcagacagcttctagagaaaagtctggtgaagcagcagttgataatagattttcttttagtgatgaaattaatcttgttttggtaatctacagcctgttagggataggtggagggatgaagtccttaaaactaaattgttcctctacgaatcttcgacctgagcctgtggagagagtagccccaaatccatctctctgctgaaaggtcgcctgttttggtaggtgtgaggacattccgaaacacggccatccacattcttgatacatcgcttcttctgcatctgccag

SEQ ID NO: 7385 - DNA, 231 bp, Homo sapiens
  unsure (1): n=A,T,C or G
  unsure (22): n=A,T,C or G
  unsure (60): n=A,T,C or G
  unsure (116): n=A,T,C or G
  unsure (137): n=A,T,C or G
  unsure (177): n=A,T,C or G
nggtcctttatcaacatttagntctttcaattaggaaatggagaatgaatgtttgagttnttaaggggaattaattgaatgatattttatcatttaagatgaaatcataacactanacacatagttgtatgttttangaggaaatttagcttttctatctgtgcttctcatgaatangagcacttcttgagactctggggtgatttaagccctttcccccactgagaccgc

SEQ ID NO: 7386 - DNA, 350 bp, Homo sapiens
  unsure (85): n=A,T,C or G
  unsure (90): n=A,T,C or G
  unsure (113): n=A,T,C or G
  unsure (151): n=A,T,C or G
  unsure (219): n=A,T,C or G
  unsure (262): n=A,T,C or G
  unsure (283): n=A,T,C or G
  unsure (324): n=A,T,C or G
tgtgatttttgctacaggccacagtcaggagcacatgatagtagcattggcacaggccacggtggaccgtttttcagtgtacagntccancaaaacctggtattctccctgangaatagtaaattcaggattattgacaggcccagcatantaaatctgctctcctttccttcttcccagaaagaaaacttgggcagagccgcctcacagatgggatangagaaattcaaaacagatgagccttgagacatgagagctaggncaagaaaaagctctttgatgncctctctcacaataattccaaatctaatggtgatatttgantttaattgcttggacacttttcaaca

SEQ ID NO: 7387 - DNA, 396 bp, Homo sapiens
  unsure (1): n=A,T,C or G
  unsure (207): n=A,T,C or G
  unsure (367): n=A,T,C or G
natttttgtcaaaatagtaggtgtaaaataatgtcttatggtttttatttgtatttacttgaatacaaataaatacaaggctgaggcttgagattgagattgagattgaggctgagcacctttctaatatttatggggcagttgtgtttccccttccatgaaatgtctgtacatgactttgcccattttaaaaaactgaggatttgnttttattaaaactttggtattatttatcctggatatttcctttataggttatatgtgtcccagtgtgtgacttatctttccctttttgtgatatgttgattaagcagtagttcttaatgaaattgaattagaatttttcttcattttatacttcttgggnctttctaaataaatctttcctaactcagg

SEQ ID NO: 7388 - DNA, 238 bp, Homo sapiens
ctggagagaagagagactgagtgccacccatgagaactggtggctcctctgggagggaacctggatacagtgaggagaaaagagcactgtgaattagagccagacgcttaagtccaggtgagacaggttatgccatcttccaaagtgtctaattgcctcaggcgtgaaaccaattcctatttacttacccagctccatggggtactgagatacatggggccgaaaaggggtaatatgg

SEQ ID NO: 7389 - DNA, 128 bp, Homo sapiens
  unsure (19): n=A,T,C or G
  unsure (24): n=A,T,C or G
  unsure (26): n=A,T,C or G
  unsure (46): n=A,T,C or G
  unsure (50): n=A,T,C or G
  unsure (60): n=A,T,C or G
  unsure (83): n=A,T,C or G
  unsure (110): n=A,T,C or G
  unsure (120): n=A,T,C or G
ttgaaaaaaaaggaccaangttcnanctacttccaggggaatccancaanatcccccgtntgaggactgacctttttccaaanacaaaaatccaggacttgaatcgtatnttcccctttntgaggact

SEQ ID NO: 7390 - DNA, 183 bp, Homo sapiens
ctgtgagggctccataaccactgttttcttatcttgttaagaggacatggcatgtggcagccaacaccttgacttcaaggtgaatgctaaaggaagagccttgtatttaaaatgaaatgaaagacaagcaacaagtcctgggcagtccagagattgtattctctacagatggcctgtttgcaa

SEQ ID NO: 7391 - DNA, 189 bp, Homo sapiens
ccatggacaagctgaggaagatgctggttccctgcccacagaccttccaggagaatgacctgagcaccttctttcccttcatctttgaagaagaacctatcttctttgacacatgggataacgaggcttatgtgcacgatgcacctgtacgatcactgaactgcacgctccgggactcacagcaaaaaa

SEQ ID NO: 7392 - DNA, 101 bp, Homo sapiens
  unsure (4): n=A,T,C or G
  unsure (12): n=A,T,C or G
  unsure (22): n=A,T,C or G
  unsure (26): n=A,T,C or G
  unsure (27): n=A,T,C or G
  unsure (90): n=A,T,C or G
gacntgctgtanaccctggttnccanngcacagggtgaccgtgtgatggtggtgctgggcccacagactggaagggtgggacatttgctnagccgggacag

SEQ ID NO: 7393 - DNA, 206 bp, Homo sapiens; identical to SEQ ID NO: 270

SEQ ID NO: 7394 - DNA, 182 bp, Homo sapiens
  unsure (1): n=A,T,C or G
  unsure (130): n=A,T,C or G
  unsure (161): n=A,T,C or G
nctgacatcccagagatcagtttcctttctgggagggactcctcattgaggggggtgcagaagacctgcagacctgcatcaaccctggtctttgaggcttcaactccagcacactggcggccgttactantggatccgagctcggtaccaagcttggcgtnatcatggtcatagctgtttcc

SEQ ID NO: 7395 - DNA, 284 bp, Homo sapiens
  unsure (1): n=A,T,C or G
  unsure (57): n=A,T,C or G
  unsure (91): n=A,T,C or G
  unsure (146): n=A,T,C or G
  unsure (166): n=A,T,C or G
  unsure (226): n=A,T,C or G
nctaaaacactctttacgccggcttctattgacttgggttaatcgtgtgaccgcggnggctggcacgaaattgaccaaccctggggttagnatagcttacttaaactttcgtttattgctaaaggttaatcactgctgtttcccgngggggtgtggctaggctaancgttttgagctgcattgctgcgtgcttgatgcttgtccttttgatcgtggtgatttaganggtgaactcactggaacggggatgcttgcatgtgtaaacttactaagactaatagaaa

SEQ ID NO: 7396 - DNA, 101 bp, Homo sapiens; identical to SEQ ID NO: 662
  unsure (7): n=A,T,C or G
  unsure (17): n=A,T,C or G
  unsure (19): n=A,T,C or G
  unsure (21): n=A,T,C or G
  unsure (24): n=A,T,C or G
  unsure (43): n=A,T,C or G
  unsure (55): n=A,T,C or G
  unsure (61): n=A,T,C or G
  unsure (65): n=A,T,C or G
  unsure (73): n=A,T,C or G
  unsure (76): n=A,T,C or G
  unsure (84): n=A,T,C or G
  unsure (93): n=A,T,C or G
  unsure (97): n=A,T,C or G

SEQ ID NO: 7397 - DNA, 373 bp, Homo sapiens
  unsure (1): n=A,T,C or G
  unsure (346): n=A,T,C or G
ncctacaggtgtgcactgaattattcccaaaaccattcacccttccccacaccgtctctgcaccaagcaccaaaaatttgataaaaactattacttattgaaaaccacttaaaattgcaatgaaaaaaattttaaatccttaccaaaacagagaaagaaaaaacaaaatgcttaccaagcccccaatatagctttcaagatatttagattaaactctaacctattgtatcttaagcacataataaggcacataataagaaattaagtaaatacacagtaattctgagtaagtattagagattataggtggtcaaaaaacccttgagattaatttttttctaaaagnaagaccttaccaaaaataactttttaa

SEQ ID NO: 7398 - DNA, 339 bp, Homo sapiens
ctgatataatacaatccagctttattcgaaagataagtattctaactcttgttcggtgtttattcaaacttgtgtttgcatgtatttgtttggactataaattttgagactatagtgagtatgtttttgactataatattttaaatggaagatgaaatttaaattaagtatttgcttgtttctttttacaataaaataggtagctttgcagtttggggagggctgttttccatgattgactgtagtatggttcaagtcagaggaaaggaagatccctggaactccatcacaagtgggccttaacgggagccatactggcagcaagaaatggaccagtgg

SEQ ID NO: 7399 - DNA, 467 bp, Homo sapiens
  unsure (1): n=A,T,C or G
  unsure (21): n=A,T,C or G
  unsure (50): n=A,T,C or G
  unsure (59): n=A,T,C or G
  unsure (92): n=A,T,C or G
  unsure (161): n=A,T,C or G
  unsure (190): n=A,T,C or G
  unsure (281): n=A,T,C or G
  unsure (343): n=A,T,C or G
  unsure (416): n=A,T,C or G
nttttgaataaatccctccgngtgccagctatcacattcaaatttgaatnctaggatgngaaggccataataaaagcagaaaacactttttnccaaaaaccacaataaataattttcaaaccagacattgtacaattttaaattatttttcaagtaaaatntacctacatggtaaatttcatttattcangtgaaattaagtctttgtttggtgagcctttagccacaataaagagaaacaagtaatacccaagtgtagtagggaatagagtaactttgtntcccctaatgccatgctcattagctggggtaagcctgacaatgtcttgccccttaccatggncaagcccccactcaggagccccccgccctgctccatcaagccatgggtcatgcccacaaggcatgtccaatgnctggaccccatactgggctgaaaaactgctatcctgtgaagaggaaggggt

SEQ ID NO: 7400 - DNA, 421 bp, Homo sapiens
  unsure (1): n=A,T,C or G
  unsure (65): n=A,T,C or G
  unsure (69): n=A,T,C or G
  unsure (76): n=A,T,C or G
  unsure (102): n=A,T,C or G
  unsure (164): n=A,T,C or G
  unsure (199): n=A,T,C or G
  unsure (289): n=A,T,C or G
  unsure (295): n=A,T,C or G
  unsure (297): n=A,T,C or G
  unsure (326): n=A,T,C or G
  unsure (329): n=A,T,C or G
  unsure (336): n=A,T,C or G
  unsure (384): n=A,T,C or G
  unsure (388): n=A,T,C or G
  unsure (414): n=A,T,C or G
nggttcgactttgccaatgtccaggagcaggcttcctgggtgtgccagtgtgatgacaacatggntcanagactanaaacagacttcaagatgactcttcancagcagagcaccctggagcagtgggctgcgtggcttgacaatgtgatgatgcaagcactganaccctatgaaggaagacccagttttcctaaaccgncaggcagtttctgctaaaatggtctttctacaggtatcatctaggtttttcctaggctttcttcttcatattctgcaaatatgtgtgtgnatgtgntngtatatgcttctgtgacaaaagaaaaganagnaataaanactttagtttgtggaaactccctgttacaactaccttcaacccaactnaggngattacccaccatggaaatgtaccangaaactt

SEQ ID NO: 7401 - DNA, 112 bp, Homo sapiens
ccaacatggtgaaaccccgtctctactaaaaatacaaaaaaattagctgggtgtagtggcaggcacctgtaatcccagctactcgggaggctaaggcaagagaatcacttga

SEQ ID NO: 7402 - DNA, 379 bp, Homo sapiens
  unsure (190): n=A,T,C or G
  unsure (348): n=A,T,C or G
cgaaaggcggcaaaaagggagccaagaagaaagtggttgatccattttctaagaaagattggtatgatgtgaaagcacctgctatgttcaatataagaaatattggaaagacgctcgtcaccaggacccaaggaaccaaaattgcatctgatggtctcaagggtcgtgtgtttgaagtgagtcttgctgnttttgcagaatgatgaagttgcatttaaaaaattcaacctgattactgaagatgttcagggtaaaaactgctgactaacttccatggcatgggatcttacccgtgacaaaatgtgttccattggtcaaaaaatggcagacaatgattgaagctcacgntgatgtcaagactacccgatggttcttgctt

SEQ ID NO: 7403 - DNA, 288 bp, Homo sapiens
  unsure (1): n=A,T,C or G
  unsure (83): n=A,T,C or G
nccaggttccataggatcccatcagagcagattcaggtttggcttgagttatcgatattagggtcctactaggattctctaantttatatcaaagttcagcctctcttcaaactctcctgattccttttgcctcaagaaagaaagaactccaggatccttgggctgcaggacaaatatgccatactccttgtgggtggacaatatcataggattttctgtatagctgctccagatttcagatggagcatcccctggcttcatgcaaagtaacttcaaatctgctttgg

SEQ ID NO: 7404 - DNA, 152 bp, Homo sapiens
  unsure (1): n=A,T,C or G
  unsure (14): n=A,T,C or G
  unsure (15): n=A,T,C or G
  unsure (145): n=A,T,C or G
  unsure (150): n=A,T,C or G
nccaggctggtttnnaacttctgacctcaggtgatccatcctcctcggcctcccaaactgctgggattacaggcgtcaactaccacgcccggcactccagcctgggtgacagagtgacactctatcaaggaggaaaaaaaaaaangaaanga

SEQ ID NO: 7405 - DNA, 391 bp, Homo sapiens
cctggcccccaagaacacagtgataggattcagcatttggtgtttctaattatacaatgactacatatatatcatagacttgctctcatccattctccaccataaagtttcaatttcctcttaaaatatggcagtcaagtttagtctcattcaaaatcttatctggtcctacagcatattacagacttagactcactcttctgttttaattgatgttactgtgtagcccgaagattttaaaaaaagatttatagatatacacttgaaattctgcagtcttgaaatactacaataaatttttcttacttatgaaaagccaacaacaacaaaaaaggccaggccaggcataagacagaggggaagggaagatgaggagggaggtttgagagtc

SEQ ID NO: 7406 - DNA, 341 bp, Homo sapiens
cgagcttacattttaggagttaagttctagaggccaatgatcctttgtttggggtattgaatattatctagtatatccagtacaggtttaagagtagttgctattttataaatgttcaacatggaccagaaaagcatcagtctataaatggattccttgggcccagagctctgacagaagaaaagtttgagtgtttgggggtagtggggtggtgactgcattactatattactgcagcatttctggtttatgtacagtagcactcaataaatatatgtttactttaattgagtaggcataaatagcattcaccagaaatcctttgctggcagccagacctc

SEQ ID NO: 7407 - DNA, 219 bp, Homo sapiens
  unsure (2): n=A,T,C or G
  unsure (140): n=A,T,C or G
gncttgcttcttacctctatgggttcacgtcattgtatcgcctccctttggatctctcccttattttgggtggaggagcttctttggctggagcctatgctgatgggaccaacgttagagctttgatgcagagaaaaatntaaattctgcaggtacatactgttcttccttcccttctttgccatctttgtagaacctgggccttttattgcagaaggg

SEQ ID NO: 7408 - DNA, 355 bp, Homo sapiens
  unsure (202): n=A,T,C or G
  unsure (252): n=A,T,C or G
  unsure (284): n=A,T,C or G
ccactgcactgaaaaaattgaaaagtcttggtttaattcatgctgatctcaagccagagaatattatgttggtggatcctgttcggcagccttacagggttaaagtaatagactttgggtcggccagtcatgtatcaaagactgtttgttcaacatatctacaatctcggtactacagagctccagagattatattggggtngccattttgtgaagccatagacatgtggtcattgggatgtgtgattgcanaattatttcttggatgggcccgctctacccangagccttggagtatgatcagattcgatacatttctcagactcaagggttgccagggagaacaagttgttaa

SEQ ID NO: 7409 - DNA, 168 bp, Homo sapiens
  unsure (1): n=A,T,C or G
nccactgtcacggtgtccccagccccccaggtggctgcgcactgcatcctcagtgtccagtggaaagatcgtccagtccgtgaggatattggaactgagagtcaggttagaaaccaaacccttaaaatcgttgatatatgcaccatagttcacacgtcccatgttctc

SEQ ID NO: 7410 - DNA, 440 bp, Homo sapiens
  unsure (1): n=A,T,C or G
nctgactatgtcactcttatgagttctgctcaggaacaagcataaaactgaataatatgacatcacagtccaagacctggtaagagttggtttctttttatttggaaataactatggtcaactttcattaatgtggaagttgactgataatgttaagagtcaaagtgaaaaagaaagcccgatcccatattcaacagtgctttcagttacaacattttttgaatttccttctctaaaacattcacagcagaggtgtccatttcacttgcctgtttcacctctagataccaccacagttgctggggtcatgtgaggtaaaggaatatatccaattgactgttagcccaacatgactatctgcaattctgatagaaaagctactttcagccatgtcttacaaagtgcttaaaagctggacagaagactttaaataaagctta

SEQ ID NO: 7411 - DNA, 319 bp, Homo sapiens
  unsure (1): n=A,T,C or G
nctgccggctcagcattgttcaagattcttttaaaggactggggggattttaatatccagaaaatgttaaagcagcaaaagaaaaaataaattaaaaagtcattgcaattggagatattaccaaggatgtgcttactataaagtcttcttgacatgttaattataaaatcttccaacctttggtattaaaaaaaatcatgtgaatagttgtcctatattgccttgtcatctataatttataacatagaagaaatttgctgatttttttaaaaagatggcaaacatgaatcatgactcattcaaataaaatacaaccagc

SEQ ID NO: 7412 - DNA, 121 bp, Homo sapiens
  unsure (10): n=A,T,C or G
  unsure (16): n=A,T,C or G
  unsure (105): n=A,T,C or G
tttttttttnttcagngaagtttatttcaaaaccattgaacagtatgatatttgctcatttataaatattcccatttaaataatctgagcttatatattttcagngttaattaaaggactt

SEQ ID NO: 7413 - DNA, 304 bp, Homo sapiens
ctgctgtacgtgctgctcacagactgctatgtctacctgctccggaaaggggccacagagaagccatacctggtggaagaggccgtttcttacaatgaacttgactatgtgtcggttggccttgaccagcagacggtgaagctggtgtgcaccaaccgcaggaagcagtttctgctggacacggctgatgtggcgctggctgagttctttttggcttctttgaagtcagccatgatcaaaggctgtcgagaacctccctaccccagcatcctgacggatgccaccatggagaagctggcactgg

SEQ ID NO: 7414 - DNA, 434 bp, Homo sapiens
  unsure (197): n=A,T,C or G
  unsure (286): n=A,T,C or G
  unsure (375): n=A,T,C or G
  unsure (406): n=A,T,C or G
  unsure (418): n=A,T,C or G
ctttgccgttgaagctgctaactaccaagacactattggccgcctgcaggatgagattcagaatatgaaggaggaaatggctcgtcaccttcgtgaataccaagacctgctcaatgttaagatggcccttgacattgagattgccacctacaggaagctgctggaaggcgaggagagcaggatttttctgcctcttncaaacttttcctccctgaacctgagggaaactaatctggattcactccctctggttgatacccactcaaaaaggacacttctgattaanacgggtgaaactagagatggacaggttatcaacgaaacttctcagcatcacgatgaccttgaataaaaattgcacacactcagtgcagncaatatattacccagcaagaataaaaaaganatcctatcttanagaaacagctttcaag

SEQ ID NO: 7415 - DNA, 363 bp, Homo sapiens
  unsure (1): n=A,T,C or G
  unsure (333): n=A,T,C or G
ngttgatgtcgaaaggatggaagaagccaaaactgaacttcacaaaataactaggatatcagaaaatcagggagtccctgtacttatagttactaacaaacaagatttgaggaactcattgtcactttcagaaattgagaaattgttagcaatgggtgaactgagctcatcaactccttggcattgcagcctacctgtgcaatcataggagatggcctaaaggaaggacttgagaaactacatgatatgatcattaaaagaagaaaaatgttgcggcaacagaaaaagaaaagatgaatatcaatacctattatatctgtgtgggagtaaggntttctctggtctgattttgacaaataagaa

SEQ ID NO: 7416 - DNA, 143 bp, Homo sapiens
ctggatatgttttggatcatctaacactactctacatcctgttagaacttccattattacaattccaaagctgtagacatctgttttaatggaaagtttcccctgtctgatgtactcttctggcatgtaccacagatgtttac

SEQ ID NO: 7417 - DNA, 459 bp, Homo sapiens
ctgaatttctgaaagtgtttccttacaatggtggtacctggctcagggatgggcaggggtagccaaaccctccccgtgctgcccagttcgctgagggtgggagtaggaacaaaagtttaaggctgaggccactgccatgccctggatgtaacaaccaggaaaatcatgttaatcaaggaaacaaaaattcctctagactctgcaatactgcactcttaacaaaaatcaaatgaaaacaagacgtgtctgccacaggtctcaggataacagatgccctgtccactgagagcggcagttctgcagtcagagttctttgatcagccctggacccatttatcacatgggggaggaagggagggtgccctctcgcctggtcccatgatcctggcatggtgcaggttccagcgatgtcccaggcagggtggcaaagggacacccggtaggatgaggcactcagtg

SEQ ID NO: 7418 - DNA, 469 bp, Homo sapiens
  unsure (174): n=A,T,C or G
taaatatgcatgtgaacattcagactgggaaatgggaacctgatccaacaggcaccaagagctgctttgaaacaaaagaagaagttcttcagtactgtcaggagatgtatccagagctacagatcacaaatgtgatggaggcaaaccagcgggttagtattgacaactggtgcncggggggacaaaaagcaatgcaagagtcgctttgttacacctttcaagtgtctcgtgggtgaatttgtaagtgatgtcctgctagttccagaaaagtgccagtttttccacaaagagcggatggaggtgtgtgagaatcaccagcactggcacacggtagtcaaagaggcatgtctgactcagggaatgaccttatatagctacggcatgctgctcccatgtggggtagaccagttccatggcacttgaatatgtgtgctgccctcagacaaagattattggatcttgtgtccaa

SEQ ID NO: 7419 - DNA, 486 bp, Homo sapiens
agcgctggagctttccttattagagaaagtgaaacattaaaaggaagcttctctctgtctgtcagagactttgaccctgtgcatggtgatgttattaagcactacaaaattagaagtctggataatgggggctattacatctctccacgaatcacttttccctgtatcagcgacatgattaaacattaccaaaagcaggcagatggcttgtgcagaagattggagaaggcttgtattagtcccaagccacagaagccatgggataaagatgcctgggagatcccccgggagtccatcaagttggtgaaaaggcttggcgctgggcagtttggggaagtctggatgggttactataacaacagtaccaaggtggctgtgaaaaccctgaagccaggaactatgtctgtgcaagccttcctggaagaagccaacctcatgaagaccctgcagcatgacaagctcgtgaggctctacgcttggggtcac

SEQ ID NO: 7420 - DNA, 452 bp, Homo sapiens
  unsure (1): n=A,T,C or G
nccactaatgtgccatcttgagttggaaaacaaaccccctccccccaaaaaaaaccctgccgctttggtgtcctatttatatatttttaaaaacattcattaaaaaaatcaaatctataataaaaatgtccctgtttgttttaaaaaagcattagtaggcatcccttatctactaaaaccatttgtttttcctaagatgcctggaagcagaaaagcgagtgagattaactcactgcgcaattaattaaaattagaattctttcctctaaacaacttccagagcaccagaaagaagaaggggccccatcaaagggagaaataaagcccttctgactcacaggagatgaaatgttcagccagagttctaacacattctggctgcatcaaaagtctttattggattactcagaaaataactcaaggctattttaaaaatgaaagatacaggcagc

SEQ ID NO: 7421 - DNA, 396 bp, Homo sapiens
ctgccaggggggacctagagcaacttactagtttgttgcaaaataatgtaaacgtcaatgcacaaaatggatttggaaggactgcgctgcaggttatgaaacttggaaatcccgagattgccaggagactgctacttagaggtgctaatcccgatttgaaagaccgaactgggtttcgcttgtcattcatgatgcggccagagcaggtttcctggacactttacagactttgctggagtttcaagctgatgttaacatcgaggataatgaagggaacctgcccttgcacttggctgccaaagaaggtcacctccgggtggtggagttcctggtgaagcacacggccagcaatgcggggcatcggaaccataagggggacacccgcctgtgatttgg

SEQ ID NO: 7422 - DNA, 294 bp, Homo sapiens
  unsure (190): n=A,T,C or G
gggggggggagataaattttaaaaggtaagaaacaaaaatcctctatccaaataaattacaatctagagacacgaaacttacatacataggaaaaacttataactcaccaatgctgaacagcgatgaaaccatactgtaactagagagatgggagccaaaagagtatctacatggggtcatgttaacggnctgagtttctgtctccctgctatagaatctaaaagtaaatgaactggctggctgatgatatgccatcaaagcaggaaaaaacttgtttactgagctccttgagg

SEQ ID NO: 7423 - DNA, 414 bp, Homo sapiens
ctgtctctctctctaaataaaaacagtattttaaaaatatttatttggcttgttccatgtgtaattttttaaattgcaagatgctttaaaaaatgcatatatcaaagtcctatttccacataggaaatcaagaatggtgatgattaccaaacactactcactttatttataacactttcccctcttggtgttgtcacttttatttctgatgacaaaattctcctcagggagagatcccactgattttatttgagccattccatcttacgcttttaaaggagtaaaataaagcagattaaactgccaaggacacatccaggataagggcagggaaaagaaaagctggtactcaaggtatctaagttatttcatgtgtaaagggttttacgatgagtttaacttttggtagttaat

SEQ ID NO: 7424 - DNA, 158 bp, Homo sapiens
ctgaaccctcgtggagccattcatacaggtccctaattaaggaacaagtgattatgctacctttgcacggttagggtaccgcggccgttaaacatgtgtcactgggcaggcggtgcctctaatactggtgatgctagaggtgatgtttttggtaaaca

SEQ ID NO: 7425 - DNA, 187 bp, Homo sapiens
  unsure (1): n=A,T,C or G
  unsure (3): n=A,T,C or G
  unsure (20): n=A,T,C or G
ncnagacttcagttttcttnggggaagaagaggtttggtattttagggtagatataccctcagggctggaggctctacagcttctcagtaatttgtactgagagtgaaaattaatcttcactcactcactcatgtgtttaaatagcttttctttagtcccctcctatgtgtaacaaaatcatccaag

SEQ ID NO: 7426 - DNA, 423 bp, Homo sapiens
  unsure (12): n=A,T,C or G
  unsure (381): n=A,T,C or G
  unsure (382): n=A,T,C or G
  unsure (409): n=A,T,C or G
gggggggctgangcaggagggtcgcttgagcccaggaaagttcgagtccaagctgggcaacagagcaaaaccttgtctcttaaaaaagaaaaaaaatagagttcagaatagataaaagagttgttattctaagaaaatagactactgaagggagaaaggctttaataatattaaaaatagggcaaggtaatgcttttcatagtatagtaagatttgcctaataccatcttatttctttgattaaaagttacttagcttcagcatgcgtgtacattcaaaatacaaaattaaagcatgagttgtcattaatttgcagaattctatgattgaagcctctaaatgaattgtgcaggaaagggagtttgtaaacaactgactacnnacattcccattgggtcatctttaaaanctggactctgcttt

SEQ ID NO: 7427 - DNA, 278 bp, Homo sapiens
  unsure (16): n=A,T,C or G
  unsure (18): n=A,T,C or G
  unsure (19): n=A,T,C or G
ccagtcattttaattngnngttctatttacattcccaaggtaaccacgttcagtaactctctagaggctaagctgttaaaatttccatttttatacaaatagcaaagatatttctttctctttctttctttctttctttctttctttctttcttttctttctctctttccttccttccttccctccttccttccttcctttctttctttttgtttgagacagagtttcgctcttgaccccgaggctggagtgcagtggcctgatcttggctcactgca

SEQ ID NO: 7428 - DNA, 166 bp, Homo sapiens
  unsure (98): n=A,T,C or G
  unsure (151): n=A,T,C or G
  unsure (166): n=A,T,C or G
ggagagaacgcggtctgagtggtatagtgatgccagcagctaggactgggagagataggagaagtaggactgctgtgattaggacggatcagacgaanaggggcgtttggtattgggctatggcagggggttttatattgataattgttgngatgaaattgatggn

SEQ ID NO: 7429 - DNA, 364 bp, Homo sapiens
  unsure (10): n=A,T,C or G
  unsure (15): n=A,T,C or G
  unsure (20): n=A,T,C or G
  unsure (37): n=A,T,C or G
  unsure (46): n=A,T,C or G
  unsure (99): n=A,T,C or G
  unsure (113): n=A,T,C or G
  unsure (114): n=A,T,C or G
  unsure (116): n=A,T,C or G
  unsure (124): n=A,T,C or G
  unsure (129): n=A,T,C or G
  unsure (140): n=A,T,C or G
  unsure (162): n=A,T,C or G
  unsure (189): n=A,T,C or G
  unsure (190): n=A,T,C or G
  unsure (201): n=A,T,C or G
  unsure (202): n=A,T,C or G
  unsure (212): n=A,T,C or G
  unsure (258): n=A,T,C or G
  unsure (273): n=A,T,C or G
  unsure (298): n=A,T,C or G
  unsure (304): n=A,T,C or G
  unsure (311): n=A,T,C or G
  unsure (329): n=A,T,C or G
ctgtggctgnggggncgganaagcacatttttctgcngataattanaatggcttcccccatctctcacggactgtcccaagtctagaaaagaattgacntcctcttctattanncnaataaaanggaanagaatgtttgncttcctttcctttctgtagtgntaagaaaataaacgaacttaatggatnntaaattatcanngagcttaacnctgtactataaaccaaacattaccttttcaaaaagtcctttgaggngaaatattttgtatncgtaatacatagatgcacatataancccacncatatanaatctcaatattttaacncttctttgggtagttgcactaactcactaaccctg

SEQ ID NO: 7430 - DNA, 299 bp, Homo sapiens
  unsure (32): n=A,T,C or G
  unsure (108): n=A,T,C or G
  unsure (157): n=A,T,C or G
  unsure (223): n=A,T,C or G
  unsure (276): n=A,T,C or G
  unsure (298): n=A,T,C or G
gaatattgtgaacctgctgggggccgtgcacnctgtcaggaccaatttacttgatttttgaatactgttgctatggtgatcttctcaactatctaagaagtaaaaganaaaaatttcacaggacttggacagagattttcaaggaacacaatttcantttttaccccactttccaatcacatccaaattccagcatgcctggttcaagagaagttcagatacncccggactcggatcaaatctcagggcttcatgggaattcatttcactctgaanatgaaattgaatatgaaaaccna

SEQ ID NO: 7431 - DNA, 282 bp, Homo sapiens
agagttgcatacagaccaatttctgcatcagtgttatctcgaccagaggctagtaggactggagagggctctacggtatttaatggggcccagaatggtgtgtctcagctaatccaaagggagtttcagaccagtgcaatcagcagagacattgatactgctgccaaatttattggtgcaggtgctgcaacagtaggagtggctggttctggtgctggtattggaacagtctttggcagccttatcattggttatgccagaaacccttcgctgaagcagcag

SEQ ID NO: 7432 - DNA, 233 bp, Homo sapiens
  unsure (20): n=A,T,C or G
  unsure (36): n=A,T,C or G
  unsure (118): n=A,T,C or G
  unsure (152): n=A,T,C or G
  unsure (176): n=A,T,C or G
ctaagttggtaatgatgcanaagctactcaaatgcngtcggcttgtcctggctcttgccctcatcctggttctggaatcctcagttcaaggttatcctacgcagagagccaggtaccnatgggtgcgctgcaatccagacagtaattctgcnaactgccttgaagaaaaaggaccnatgttccaactacttccaggtgaatccaacaagatcccccgtctgaggactgacctt

SEQ ID NO: 7433 - DNA, 112 bp, Homo sapiens
  unsure (18): n=A,T,C or G
  unsure (33): n=A,T,C or G
  unsure (49): n=A,T,C or G
  unsure (56): n=A,T,C or G
  unsure (72): n=A,T,C or G
  unsure (95): n=A,T,C or G
  unsure (110): n=A,T,C or G
ctgttggagggggccctncccaaagggtcctgnacccctcacaggggangaactgnacttgccgctcattcngacaaaggggggtgtggacgcanccctggaatatgccnac

SEQ ID NO: 7434 - DNA, 269 bp, Homo sapiens
  unsure (240): n=A,T,C or G
  unsure (263): n=A,T,C or G
gtacttgtagaagcaaggccagtccagcatcagaaggcagaggcagcatcagtgactcccagccatggaatgaacggaggacacagagctcagagacagaacaggccagggggaagaaggagagacagaataggccagggcatggcggtgagggactgaggcccctaaattttggtcccaggggaaaggaagaggccagttggtccagttttgatggctatggggaagggaatgtattantaagcatgggggagaggatgccngcaggc

SEQ ID NO: 7435 - DNA, 264 bp, Homo sapiens
gggctccttaaccccactggtgagcctaagttgggaagcaattggctaataactggcctctcataattggattgtaatctatccctccaacagagactgacgtaagtctcctctttctcatgaaatattctgtaacttcctgcctttcttgattccttctttttctgacctcacctaccattcacaatctgtcacaccatacacctactgtgtaactatatgtttagtatgacaactgtatttgattgtgttaatgttagctgg

SEQ ID NO: 7436 - DNA, 262 bp, Homo sapiens
  unsure (16): n=A,T,C or G
  unsure (156): n=A,T,C or G
  unsure (241): n=A,T,C or G
attcttaaaacttaancatggtaaaatgttaagctgttttcatccactgatattattctactataaaaagcccttcttgagcagatttgatgataaaaaggagaacatttctaaggtataattagagaagctgttgcatgagaaatcatgtctccntctccattttgctatgcgttatctgaggattgtttctgaaagagatctatttaggcagtgtatgtatgtgtcagcatgtaaaaantaaagaactgaaaatagacaa

SEQ ID NO: 7437 - DNA, 300 bp, Homo sapiens
  unsure (231): n=A,T,C or G
agtggtataccaggaaattctgttctactcgtcacaaatctcaatcctgatcttatcacaccacatgggctttttatcctatttggagtctatggtgatgtacatcgagtgaagattatgtttaataagaaagaaaatgccttggttcagatggcggatgcaaatcaagctcagctagcaatgaaccatctaagtggtcagagactttatgggaaagtgcttcgtgctacnctgtccaaacatcaagcagtacagcttcctcgagagggacaagaagaccaaggtctgactaaggatttc

SEQ ID NO: 7438 - DNA, 322 bp, Homo sapiens; identical to SEQ ID NO: 596
  unsure (18): n=A,T,C or G
  unsure (52): n=A,T,C or G
  unsure (86): n=A,T,C or G
  unsure (164): n=A,T,C or G
  unsure (167): n=A,T,C or G
  unsure (183): n=A,T,C or G
  unsure (191): n=A,T,C or G
  unsure (254): n=A,T,C or G
  unsure (270): n=A,T,C or G
  unsure (297): n=A,T,C or G
  unsure (311): n=A,T,C or G

SEQ ID NO: 7439 - DNA, 376 bp, Homo sapiens
  unsure (293): n=A,T,C or G
  unsure (327): n=A,T,C or G
  unsure (330): n=A,T,C or G
aggtgattatcctgaaccatccaggccaaataagcgccggctatgcccctgtattggattgccacacggctcacattgcatgcaagtttgctgagctgaaggaaaagattgatcgccgttctggtaaaaagctggaagatggccctaaattcttgaagtctggtgatgctgccattgttgatatggttcctggcaagcccatgtgtgttgagagcttctcagactatccacctttgggtccctttgctgttcctgatatgagacagacagttgcggtgggtgtcatcaaagcngtggacaagaaggctgctggagctggcaaggtcnccnagtctgcccagaaagctcagaaggctaaatgaatattatccctaat

SEQ ID NO: 7440 - DNA, 357 bp, Homo sapiens
tcctactcacttaaagcccgcctgacagaaaccacggccacatttggttctaagaaaccctctgtcattcgctcccacattctgatgagcaaccgcttccctatttatttatttatttgtttgtttgttttattcattggtctaatttattcaaagggggcaagaagtagcagtgtctgtaaaagagcctagtttttaatagctatggaatcaattcaatttggactggtgtgctctctttaaatcaagtcctttaattaacactgaaaatatataagctcagattatttaaatgggaatatttataaatgagcaaatatcatactgttcaatggttctgaaataaacttccccccc

SEQ ID NO: 7441 - DNA, 285 bp, Homo sapiens
  unsure (181): n=A,T,C or G
  unsure (186): n=A,T,C or G
  unsure (205): n=A,T,C or G
  unsure (211): n=A,T,C or G
  unsure (221): n=A,T,C or G
  unsure (228): n=A,T,C or G
  unsure (260): n=A,T,C or G
aatctgtataagtatctgcagttgctggaataatttgaagaccccatggagctaaggagattaagtggaggattttcattgtttcagaggggcaaggggcaaatccattgctaattctttaatgatgaaaaatggtaagaagttgttaaactcctttggggattttaaaaagtgatacctnaacanaacagagagagagagaganaaatcncactagtgangctaacnaaaataatgataaaaaggttagaacaacccangatacttactggatgcctacacaac

SEQ ID NO: 7442 - DNA, 219 bp, Homo sapiens
  unsure (10): n=A,T,C or G
  unsure (11): n=A,T,C or G
  unsure (14): n=A,T,C or G
  unsure (43): n=A,T,C or G
  unsure (74): n=A,T,C or G
  unsure (161): n=A,T,C or G
atttcaagannggngaagaatggaaagtgggcattaactgaancagacacctcttgaggtaagatttgtggaanaagaggttaaagtgtgccagaaatttgggttaccctcctctagaaagaaattccagtaatggatctgtttaagtgttaagggagcanaagagaagacggtgaatgtacttcaatattttgaacatttttagaaataggaattctt

SEQ ID NO: 7443 - DNA, 121 bp, Homo sapiens
cctctctgccggggaaaggagggagctgcggctctttgacattaaaccagagcagcagagatacagccttttcctccctctccatgaactctggaaacagtacatcagggacctgtgcagt

SEQ ID NO: 7444 - DNA, 316 bp, Homo sapiens
  unsure (15): n=A,T,C or G
  unsure (36): n=A,T,C or G
  unsure (99): n=A,T,C or G
  unsure (125): n=A,T,C or G
  unsure (153): n=A,T,C or G
  unsure (160): n=A,T,C or G
  unsure (192): n=A,T,C or G
  unsure (203): n=A,T,C or G
  unsure (204): n=A,T,C or G
  unsure (247): n=A,T,C or G
  unsure (259): n=A,T,C or G
  unsure (281): n=A,T,C or G
ccagtcatgtattcntttcagcttatttccaactcngctatccttggctctgaaaagctgtcatcactggcatcactgtatctatcactacattaaaanaggaactaatttagcaaggtataaanaaaaacctggacaattattcaatttgcnatttcanacacattccatattaaccccttagtatgaganaaaatactaannaatattcttttaccactttctagtcaccacaggaagaggtcantccaatcacatncaatggcctctttctttggccncagaaactgatcacttattttcatccgtaaactgg

SEQ ID NO: 7445 - DNA, 332 bp, Homo sapiens
  unsure (9): n=A,T,C or G
  unsure (13): n=A,T,C or G
  unsure (14): n=A,T,C or G
  unsure (16): n=A,T,C or G
  unsure (305): n=A,T,C or G
  unsure (311): n=A,T,C or G
  unsure (332): n=A,T,C or G
ggaatcctngggnnanggttatcctacgcagagagccaggtaccaatgggtgcgctgcaatccagacagtaattctgcaaactgccttgaagaaaaaggaccaatgttcgaactacttccaggtgaatccaacaagatcccccgtctgaggactgacctttttccaaagacgagaatccaggacttgaatcgtatcttcccactttctgaggactactctggatcaggcttcggctccggctccggctctggatcaggatctgggagtggcttcctaacggaaatggaacaggattaccaactantagacnaaagtgatgctttccatgacn

SEQ ID NO: 7446 - DNA, 339 bp, Homo sapiens
  unsure (94): n=A,T,C or G
  unsure (139): n=A,T,C or G
  unsure (159): n=A,T,C or G
  unsure (175): n=A,T,C or G
  unsure (235): n=A,T,C or G
  unsure (237): n=A,T,C or G
  unsure (278): n=A,T,C or G
  unsure (298): n=A,T,C or G
  unsure (301): n=A,T,C or G
  unsure (318): n=A,T,C or G
catcgataagtccaagccctggctactgctgctggagaggcaaaggaacaatcttgcctttcagcgccgtcggaaagctcgagatattctccangcattgggttcctcatagcggttgtacaagggttcaagacgctgntgcttcttctgtttgcttancttagttgggtctganaccttgaagaaggctggggcaaactccacaagccaccgagggtcgatggtggtaacttcncncatgtattccttggtggtgagcaccagctcatggtacaccncccattctggctgtctgttnaanagggcactggaaggatngatatagaccacctgctggtc

SEQ ID NO: 7447 - DNA, 375 bp, Homo sapiens
gctcgcgaaccatcatgtcatatgcatcgggcttgggtttttcctttttgtctctgttctctgacttgggagttttgtgggacaggagagtctgaatttctttccagtcttggtctagcttctccgtgagctcgagggcatcttctcgttgagcttgtctctccctcttctcttgttttgacttggcaatgagctcttcaatcagctctttccgggacttcggtttctcccgctcctcgccttcctgttgagtcttcttgtgaaggagcccaccgcctcctccaaagtgggcagcagtcagctcagcagacaacgttcctcgatcctcagcatcgctgtcactgtccacaatgtcattatgcttctcgatgtctg

SEQ ID NO: 7448 - DNA, 262 bp, Homo sapiens
  unsure (22): n=A,T,C or G
  unsure (68): n=A,T,C or G
  unsure (82): n=A,T,C or G
  unsure (87): n=A,T,C or G
  unsure (112): n=A,T,C or G
  unsure (132): n=A,T,C or G
  unsure (160): n=A,T,C or G
  unsure (183): n=A,T,C or G
  unsure (192): n=A,T,C or G
  unsure (216): n=A,T,C or G
  unsure (239): n=A,T,C or G
catccccccaccaagcacggtntcagattaggttattacaaagggcgagggggaggagggcatcccangagtctaacatccnacccnacctatgcagaatgacgggtgaccncgccctgacccagccacacncttgaaccctgggacttcagtgaggtangtggtatcacccccatttcacangtgggcaanctgaggcacaatgaaatgcaatanctcgtttttaataacaacatacnaaagtgtggagaaagcccccaaa

SEQ ID NO: 7449 - DNA, 361 bp, Homo sapiens
ctgtttcataggggttgttggtttcttcaagttgtctctttctgatggcaatcatttgacgtccaggtggctcaaattgggcagccttcacaggatcagtggaattggctgaaatccgctttttcctgcagtagatcaaggccactacagcagcaacaatggctgctacagcagtcgcaatgaccacagccacaatgatccccatcggtgaagagctgcccatgctgggcacttggacagtgatggtcacaggcttggatgagaacagcgtgtagcctatgtttcctgtgcagtggtaatcaccactgtgactgtggtttgcttgtgggatggagaaggtgggatccaaatgggagaattt

SEQ ID NO: 7450 - DNA, 101 bp, Homo sapiens
  unsure (14): n=A,T,C or G
  unsure (88): n=A,T,C or G
ccatttaagggggngtagtaaaagactggttaatgataacaatgcatcgtaaaaccttcagaaggaaaggagaatgttttgtggaccnctttggttttctt

SEQ ID NO: 7451 - DNA, 326 bp, Homo sapiens
gttgtttcagaggtgctcacaacttcaatgaggccagagcgatctcctgttgctaaacagccataaggcaacatccgaagatccaaaccagcttctttccagagtaaatccatcaagcgcaacatttggagtgtcaacatatcctgtcgtaaatcatcaccatttttaaaaatcactccaactgaatcctcaccaaataccttgttattgtataccagccacaaaggcttcattttggaatccatgtatttgcacttttcaacatagagttctgagaggataacacatgggttcaggggtgactgcaggtcagagagggcttcccg

SEQ ID NO: 7452 - DNA, 160 bp, Homo sapiens
tacctcccacaaggattaccccttccatgaagagttttgaagctgtggttgcctgctcgtccccaagtgacctatacctgtgtttcttgcctcatttttttccttgcaaatgtagtatggcctgtgtcactcagcagtgggacagcaacctgtagagtgg

SEQ ID NO: 7453 - DNA, 347 bp, Homo sapiens
  unsure (20): n=A,T,C or G
  unsure (35): n=A,T,C or G
  unsure (36): n=A,T,C or G
  unsure (323): n=A,T,C or G
caaagcaccccatattcttntgaacctaaaggggnntcctcctcaaagaagcatgttttcaatccctaaactttggggccagatacagctccaagtggcatttattgctctttggagagtcaaagccaagccaccatgagcacgaaagctgtctgagaccctcctcccctcctccccagcatggagagaataattgccatttcaccctacaaatccgaaagagtctcccccttccgtgggtttaagcatggacacaagccaagcaagcctcagatacccaggcctgtttgattgtagctatgttggtgtatctcgtgtacaanatggaaaagtgcttttgttgttct

SEQ ID NO: 7454 - DNA, 101 bp, Homo sapiens
  unsure (1): n=A,T,C or G
  unsure (4): n=A,T,C or G
  unsure (6): n=A,T,C or G
  unsure (12): n=A,T,C or G
  unsure (30): n=A,T,C or G
  unsure (50): n=A,T,C or G
  unsure (53): n=A,T,C or G
  unsure (80): n=A,T,C or G
  unsure (90): n=A,T,C or G
  unsure (92): n=A,T,C or G
  unsure (94): n=A,T,C or G
  unsure (97): n=A,T,C or G
ngantngggggnttttaaaaaattagaggnaattaaatagtgatttattntanctataagtaaaggtttaaaaagagganagatgatttnananaangaat

SEQ ID NO: 7455 - DNA, 353 bp, Homo sapiens; identical to SEQ ID NO: 427

SEQ ID NO: 7456 - DNA, 376 bp, Homo sapiens
cagcactttgggaggctgaggcaggcagatcacttgaggtcaggagttcgagaccaacctggccaaactactttcatcgaagttgctggaagcctttctctggttttggcccctgtaggaagttaatctcatattcccttagcaataatataaggtcactgtttcagtcctacacacttttatattcaatgggcttcttagtttatcacataaggactggcacttttttcaaaagaatattgctaacagggttaaatgagtgctaatggctgaacgtttgccaaatgcttacttctgcgatagtataaatatggattattaaagttgtctactcaagtataaaatatatgcaaaactctcataggcaaaatgttca

SEQ ID NO: 7457 - DNA, 245 bp, Homo sapiens
  unsure (13): n=A,T,C or G
  unsure (23): n=A,T,C or G
  unsure (32): n=A,T,C or G
  unsure (34): n=A,T,C or G
  unsure (37): n=A,T,C or G
  unsure (42): n=A,T,C or G
  unsure (110): n=A,T,C or G
  unsure (125): n=A,T,C or G
  unsure (139): n=A,T,C or G
ctgacagcggggncttgcatttntttacccgngnatntacanatatcatttcttgtgtatgccatgacttgaaaaagtttgggaagctctttagcaatatcagctaaaangatatgaaatcacangtgatagcagttgncattcagtaatttcctacaagcagcaccccaaaggaaatatagtcctaatctttactatccacttctaaatttaatgtgaatttcatacatgttattagttgtttt

SEQ ID NO: 7458 - DNA, 316 bp, Homo sapiens
  unsure (25): n=A,T,C or G
  unsure (86): n=A,T,C or G
  unsure (315): n=A,T,C or G
tttagaattaggggtaaaaaggcanaattagtatagagtacattcattaaacatttttgtcaggattatttcccgtaaaaacgtantgagcacttttcatatactaatttagttgtacatttaactttgtataatacagaaatctaaatatatttaatgaattcaagcaatatatcacttgaccaagaaattggaatttcaaaatgttcgtgcgggtatataccagatgagtacagtgagtagttttatgtatcaccagactgggttattgccaagttatatatcaccaaaagctgtatgactggatgttctggnt

SEQ ID NO: 7459 - DNA, 305 bp, Homo sapiens
  unsure (11): n=A,T,C or G
  unsure (15): n=A,T,C or G
  unsure (47): n=A,T,C or G
  unsure (75): n=A,T,C or G
  unsure (86): n=A,T,C or G
  unsure (98): n=A,T,C or G
  unsure (107): n=A,T,C or G
  unsure (109): n=A,T,C or G
  unsure (121): n=A,T,C or G
  unsure (126): n=A,T,C or G
  unsure (128): n=A,T,C or G
  unsure (132): n=A,T,C or G
  unsure (135): n=A,T,C or G
  unsure (143): n=A,T,C or G
  unsure (149): n=A,T,C or G
  unsure (153): n=A,T,C or G
  unsure (166): n=A,T,C or G
  unsure (168): n=A,T,C or G
  unsure (176): n=A,T,C or G
  unsure (210): n=A,T,C or G
  unsure (220): n=A,T,C or G
  unsure (258): n=A,T,C or G
  unsure (259): n=A,T,C or G
  unsure (268): n=A,T,C or G
  unsure (288): n=A,T,C or G
  unsure (300): n=A,T,C or G
ccttttgatangggnttttttaaaaaacaaaattatagaagtttaanaatttaattcaaatttggaggggttttnaggaaattttnacaaaatggctngttggtttnanctgtttcctacntttgntnttgnagnaaatgggnacaggnttgnagtcaaaacactngnaattttgnatcttgatgtctttgttaaaactgctgaaaaatnattttttttnttttataataaggaataaacccccacctttattccttnntttcatctnccattttctggtcttggggntggctgtggcangcccc

SEQ ID NO: 7460 - DNA, 178 bp, Homo sapiens
aggcacactcagtattgcacttcattaaaatttcaggctcaaacttaacctagaagtttaaatgaaattgcatttgtaatttagtaattcttatacaggacaaacattgatatgtttatatacagtgtgatacttattacatttatatgctgtcctaacacaatgttttttttttttt

SEQ ID NO: 7461 - DNA, 144 bp, Homo sapiens
  unsure (142): n=A,T,C or G
tattttcctaactccatctcctaaaaaattccacctcattctgctcaacccaccacggcattcttgctgttcttgaacatgccaagcaggcccagggcctttgcattcactgtttattttgcttggaatgctctccccccanac

SEQ ID NO: 7462 - DNA, 116 bp, Homo sapiens
  unsure (21): n=A,T,C or G
  unsure (76): n=A,T,C or G
aaataggaactacaaatttanatgactctcttttgggttttatcaattttcatctgctgttacattagtattatgngcactgaattaaggtattgaaattcaatcacttcattgat

SEQ ID NO: 7463 - DNA, 355 bp, Homo sapiens
  unsure (14): n=A,T,C or G
ccagtgatgctggngctgtgacttttgcagatcagatatttggaatatttaactggataattccactgtcagttgcattatcctgttttggtggcctcaatgcctccattgtggctgcttctaggcttttctttgtgggctcaagagaaggccatctccctgatgccatctgcatgatccatgttgagcggttcacaccagtgccttctctgctcttcaatggtatcatggcattgatctacttgtgcgtggaagacatcttccagctcattaactactacagcttcagctactggttctttgtggggctttctattgtgggtcagctttatctgcgctggaaggagcctgatcg

SEQ ID NO: 7464 - DNA, 528 bp, Homo sapiens
  unsure (523): n=A,T,C or G
gtgcttctgccacctatggggtcgaggcaggtgtggtgccttggctaagtccacagacttctgagaggcccacgctttcttcttctccagaaataaaccctgaaactcaagcagctttaatcagagggcaggattccacgatagcagcatcagaacagcaagtggcagcgagaattcttgattccaatgatcaggcaacagtaaaccctgtggaatttaatactgaggttgcaacaccaccattttcccttctggagacttctaatgaaacagatttcctgattggcattaatgaagagtcagtggaaggcacggcaatctatttaccaggacctgatcgctgcaaaatgaacccgtgccttaacggaggcacctgttatcctactgaaacttcctacgtatgcacctgtgtgccaggatacagcggagaccagtgtgaacttgattttgatgaatgtcactctaatccctgtcgtaatggagcccttgtgttgatggttttaacacattcaggtgcctctgncttcc

SEQ ID NO: 7465 - DNA, 486 bp, Homo sapiens
  unsure (175): n=A,T,C or G
  unsure (271): n=A,T,C or G
  unsure (394): n=A,T,C or G
  unsure (395): n=A,T,C or G
  unsure (415): n=A,T,C or G
  unsure (436): n=A,T,C or G
  unsure (446): n=A,T,C or G
gttgtgtgtctgcaaacaatatgtgagccgaacatcaccaatgcctcctgaaaatgggctctgactcacttcctttttttgccaagataggttttgctttgttgtttttttctaaattgtttttgcaaacagggcataacaggtaaaaaaatactttgtaagaatattattttanaaaacccaacacaaaactgcaaatacagctccggaagcccttctcttcaactgtggttagtttgtttttgtaccttttaccccaaaggaaaaaagntggcatcttgttacttatttttatccattacattcagcacctcatccaaaagtgagggcccaagatcaagctgcagggagaggagggaacctgtaaggtcagagagggactcctctgacttannctttcccttgatgagctccnatggggtgggatggtcaaacntgtcctcggntggacctgccgggccgggccgctcgaaagcccaattcccc

SEQ ID NO: 7466 - DNA, 384 bp, Homo sapiens
  unsure (20): n=A,T,C or G
  unsure (116): n=A,T,C or G
  unsure (161): n=A,T,C or G
  unsure (179): n=A,T,C or G
  unsure (184): n=A,T,C or G
  unsure (185): n=A,T,C or G
  unsure (203): n=A,T,C or G
  unsure (218): n=A,T,C or G
  unsure (232): n=A,T,C or G
  unsure (253): n=A,T,C or G
  unsure (256): n=A,T,C or G
  unsure (290): n=A,T,C or G
  unsure (307): n=A,T,C or G
  unsure (311): n=A,T,C or G
  unsure (318): n=A,T,C or G
  unsure (348): n=A,T,C or G
  unsure (367): n=A,T,C or G
tatacaactatagaggatgnaatttttgacctattttaaatattgtcattctaaaataagcatgtaatatcactttcaggatatattcagtggaatctaaatatcatagtggtttnacctcttacatcattcttttaaaagtagtcttttattaagagtcnaaaattttatatttttgntttcnntggactaattctaaaatntaacttcctcttacngaatgttatcaaanattatatagctatatgcttanaantcttctattgattaagccctccaacttaagtacntcaaaatttgtactttnaagnttaaatncttttttccttgtgaacataatcctataanctaaaattttcctggaccnagctatttttgtagctc

SEQ ID NO: 7467 - DNA, 436 bp, Homo sapiens
atcccaaaaattacccaaagaagaagatggaaaagcgatttgtcttcaacaagatagaaatcaataacaagctggaatttgagtctgcccagttccccaactggtacatcagcacctctcaagcagaaaacatgcccgtcttcctgggagggaccaaaggcggccaggatataactgacttcaccatgcaatttgtgtcttcctaaagagagctgtacccagagagtcctgtgctgaatgtggactcaatccctagggctggcagaaagggaacagaaaggtttttgagtacggctatagcctggactttcctgttgtctacaccaatgcccaactgcctgccttagggtagtgctaagaggatctcctgtccatcagccaggacagtcagctctctcctttcagggccaatccccagcccttttgttgagccagg

SEQ ID NO: 7468 - DNA, 453 bp, Homo sapiens
  unsure (146): n=A,T,C or G
  unsure (226): n=A,T,C or G
  unsure (252): n=A,T,C or G
  unsure (257): n=A,T,C or G
  unsure (263): n=A,T,C or G
  unsure (319): n=A,T,C or G
  unsure (349): n=A,T,C or G
  unsure (365): n=A,T,C or G
  unsure (378): n=A,T,C or G
  unsure (391): n=A,T,C or G
  unsure (417): n=A,T,C or G
  unsure (422): n=A,T,C or G
  unsure (426): n=A,T,C or G
  unsure (447): n=A,T,C or G
aggggacttccacacctcctgcctttaggccatgggtggaaagtgctcagtgaagtacacctgtgtggcccagttctgaaagctttatacagttgaattttaagtggggttgataacaccttggactgttagtgttaaaaatctantgggttgacctttaaatgcaacagtttttaaaatatattgctgcattttatagaatagtaaaggtaccattatacttganattttcctccatttttatttcttccngaacntagagnttggggccgaaaatgtttttaaagtatgtgtttgagttaaatataaagttggttcncttcaaagctaaaaaattgttaaacttgcngcttggtattgcaganaagattttataanaattttgctttanagaatgccctttggctgaactaccantgtangccnccattataatttataaatacngcatac

SEQ ID NO: 7469 - DNA, 219 bp, Homo sapiens
agggaggctctaagctaggggcactgcatggtgggacaggatggccccttgaggactgaaccctggggagaagacaaacagtaataataaaaacaaataacaagtactttaagaatggattgtatgacctatagtgacagatgacatcactaatactgaaagcttcttatattaataattttggcaaaatgtcattttgtaatatagtatatgctttcc

SEQ ID NO: 7470 - DNA, 273 bp, Homo sapiens
  unsure (230): n=A,T,C or G
tggataattctctaccctcaccccacagagccatctctctccagaccaaaagctggaaggagagttgctttgagagcttgtttttacaactgcatgtttattatgatactttctctccaaaggaaacttttaaatcaatgggaacaattagcaacagaaagagcacagtccctgcttttgactgggttcctattttaagcacaaatgagagctctggagccagaatgccngggttctaacttcagcattcacttactagctgtatgatcttgg

SEQ ID NO: 7471 - DNA, 553 bp, Homo sapiens
  unsure (524): n=A,T,C or G
gagagaagctcctgaaccaaccatttgtcaggtctggggacaagactggaagtattgactcatttgcaaggaaactaagtgggtcaacaatgaaagaaggtaataggacctcatctgcaatcctccaatttatctgcaggataaattaaatgcctaaaaaagaaacttattttttaaagtatctgctaccatcaggaaaccaaataaatagtcagtctattaatttcgttcttaaataattccgatcctttacctaatttcttgagccatttaatcatctcaactctaccttagaaccctcccaatgttttccaaatctgtcttactgggaaacaaagattaaaattcctaataaggattattttgtggatcttaatttctagattcccattttaaaattttaattccattaatttcttaataatagcattctattactgattgaatcatctctaataagccatcataatttccagaccatttctaagaacacgagctgatattgaaatgtttactaatgaccngccccgggcggcccgctcaaaacccaatt

SEQ ID NO: 7472 - DNA, 465 bp, Homo sapiens
  unsure (396): n=A,T,C or G
  unsure (414): n=A,T,C or G
ggcactacagttactaagcagcctttggattctttgtttttgaagttagatcttttcagctattagtggaaaatgtgcctcactctactccaggattaccaatagaaatgaaaggacagaaatggcattagtgtttagagaagattatgtatatatggctgtgtgaacactgaaaattatgagggtcaacataaaatcagcattacaggtactaaaacataaatcctgatggctttcaccgttttcttaagagcaaaattgcaaaaagtgatattaacagtcatcctagacgaatatgagcaaatgatttgtttttccttaaaagagcctccaagtgtattgtgatcattttcacactgatcaaagagagcacccttctgtcaacaggtatctgcngttttcaggacctggcanaaattcttctatgttctgcctttaaaggtcaggtaccaaaagcagagacag

SEQ ID NO: 7473 - DNA, 500 bp, Homo sapiens; identical to SEQ ID NO: 271
  unsure (172): n=A,T,C or G
  unsure (264): n=A,T,C or G
  unsure (309): n=A,T,C or G
  unsure (427): n=A,T,C or G
  unsure (434): n=A,T,C or G
  unsure (498): n=A,T,C or G
  unsure (500): n=A,T,C or G

SEQ ID NO: 7474 - DNA, 531 bp, Homo sapiens
  unsure (129): n=A,T,C or G
  unsure (388): n=A,T,C or G
  unsure (450): n=A,T,C or G
  unsure (474): n=A,T,C or G
  unsure (512): n=A,T,C or G
  unsure (524): n=A,T,C or G
aatggttctgacttaaataggttgttgagcaaggagatctcacattttaaagaatattttcagagggagaatttgagaaggggggagaaaaaaacaaacaggaatgaacataaaagtataaaattctanacaacccactaaaccagttagcaaaaagaggagctcttaattgaaatagagaatttccccaaaaaaaggtctgaatttatttttaaaacattagatttggaaaatacctaatttgaaagtttaattttcatatatacgtcaaacctgcttttagggtagtttagtcaaagctgaaacaaaacaaataaaattctggcttatatatctgatacttgaataaggactctgaaaaaaaatgttcccgttttttttctcgtcngcctaagatatatttttgacattacataaatttcagtgatatgatctggctcctatttaacntttatgccctttctcttccaatgntaacttttaattttctcctcttcttctagctgggatcnttaaaaaaaacngaaaact

SEQ ID NO: 7475 - DNA, 251 bp, Homo sapiens
  unsure (228): n=A,T,C or G
tcaccatggagtggtgagggtccgaggctgagacgtgtgcagatggaggagaatgggcagaggagcctgtgggttttctctgactctaggtccccactccagcaagacagcgccgctgcagcttggcccagcaagttcctccttgcagtttgggggtcaaagccacagttcatatgaaacaaaatgttcctctgcctggtctggtcctctctttgtgtattttcctanaggacctcacagtgggtgagtgg

SEQ ID NO: 7476 - DNA, 450 bp, Homo sapiens
  unsure (216): n=A,T,C or G
  unsure (340): n=A,T,C or G
  unsure (377): n=A,T,C or G
tgaatagcgtttccagccgaaccaaacaccgaacaaaattatcaaaatcgatgatgagctggtcatctgcaaaccgagcaacgatgacttggtggagttgacagggcatcttgaaacctgcttcttctaatgccttccgcatttcataggaattcatggtaccagacctgtcaacgtcgatttctcggtaaattttttggtatttttgaatcttcntccagagaatgtagaactccttcagccccagcttgccactcccgtccgaatctagcatgtcaaccataattttgcatgtctcgatgctgaagccatctgacttgatatcttggcgctttgctanaacccttctcaggatggtctgcagctcaaaggcaganatctccgcatcctctcctgccaactgggcaaacagtctcctgaatccatcatcaatgtcatccctcgcttgat

SEQ ID NO: 7477 - DNA, 477 bp, Homo sapiens
  unsure (442): n=A,T,C or G
gaagacagcatctaagctgtgttcagccctgactctttctggtcttgtggaagtgaaagagctgcagcgggagcccctaacccctgaggaagtacagtctgttcgagaacaccttggtcatgaaagtgacaacctgctgtttgttcagatcacaggcaaaaaaccaaactttgaagtgggttcttctaggcagcttaagctttccatcaccaagaagtcttctccttcaggtaaggctggcctagggacattcttctgtttgaatgggcttagagggacatgttagaaattgagccagcaataaatgagatggtgatatttttagaggattagtcctttgatttctgccatttccacaaagaagaatacttaatgtattattatcatgggcatattaggatccaaaactgaaataatacataggtattatctagttcagctncttcttctgcaccagaagatacccgaggacctcgc

SEQ ID NO: 7478 - DNA, 420 bp, Homo sapiens
gcacccaaaatggcaccacccaaaaaaacacaacctatgtcgggttcggatttttaagaagttatttcagttaagcagacactaaagtacaattatacttggcttcttgtggcataaatgatcttgaattttaagatcatttggcttttacctatttagaacaaaacagtctatattttcctgtacttagaagttggaaatgaaataatttttaaagcccacaggagattaatttgtactaagtcattactatgtatcaggcattgtgcttggtgctttctagtcactgaaggagtattaaatatgtgaaatgcctgtcacagtgacttgcatgtggcaatcactcaaagatccccttctttaaccaatgtggtgaggttgtagtattattataaatttttaattatataacaactgagg

SEQ ID NO: 7479 - DNA, 389 bp, Homo sapiens
  unsure (165): n=A,T,C or G
  unsure (173): n=A,T,C or G
  unsure (258): n=A,T,C or G
  unsure (337): n=A,T,C or G
  unsure (357): n=A,T,C or G
  unsure (366): n=A,T,C or G
  unsure (370): n=A,T,C or G
tgtaacccacctcagggtgggaattctttgcatgggatcgttcaaagttctgagaaaagcccaatgtaggtcagacacgactgctccttggactggggaagactttccttggttgtcagtccatagtgggcaggcggtcggctgcacagcggaatcccagattcnaagcacanctatcaggtgtgttctggctccgagcagcacagcgatacctgtaacaataagacctatggcacatgtaggatccacctttcttcnctcggtctttcccagaagggggaccttttgggttaagcgtttcttcaacagaatgatgaacagtccaccagtctgaagnccattcccatgcgttccccnctatgttgnatangccataaccattgggaggg

SEQ ID NO: 7480 - DNA, 511 bp, Homo sapiens; identical to SEQ ID NO: 272
  unsure (268): n=A,T,C or G
  unsure (358): n=A,T,C or G
  unsure (437): n=A,T,C or G
  unsure (480): n=A,T,C or G
  unsure (501): n=A,T,C or G
  unsure (504): n=A,T,C or G

SEQ ID NO: 7481 - DNA, 101 bp, Homo sapiens
  unsure (56): n=A,T,C or G
  unsure (60): n=A,T,C or G
  unsure (63): n=A,T,C or G
  unsure (68): n=A,T,C or G
  unsure (80): n=A,T,C or G
  unsure (92): n=A,T,C or G
  unsure (100): n=A,T,C or G
atgtgatggtgtccaccttccacaagtactcgggcaaagagggtgacaagttcaanctcnacnagtcntaactaaagganctgctgaccccnggagctgnc

SEQ ID NO: 7482 - DNA, 117 bp, Homo sapiens
  unsure (12): n=A,T,C or G
  unsure (36): n=A,T,C or G
  unsure (45): n=A,T,C or G
  unsure (60): n=A,T,C or G
  unsure (74): n=A,T,C or G
ataggtggaggnatcccatattctccacatttttanctctgtcangctgctccctttccnccagtcctatccantgatactgcagacaaagggtgaggcaacaggagacatcatacc

SEQ ID NO: 7483 - DNA, 101 bp, Homo sapiens; identical to SEQ ID NO: 273
  unsure (4): n=A,T,C or G
  unsure (10): n=A,T,C or G
  unsure (16): n=A,T,C or G
  unsure (26): n=A,T,C or G
  unsure (37): n=A,T,C or G
  unsure (38): n=A,T,C or G
  unsure (71): n=A,T,C or G
  unsure (98): n=A,T,C or G

SEQ ID NO: 7484 - DNA, 415 bp, Homo sapiens
  unsure (131): n=A,T,C or G
  unsure (173): n=A,T,C or G
  unsure (198): n=A,T,C or G
  unsure (249): n=A,T,C or G
  unsure (286): n=A,T,C or G
  unsure (337): n=A,T,C or G
  unsure (386): n=A,T,C or G
  unsure (387): n=A,T,C or G
aatactctaatgggagaaggaatttgttcacttgttgaacttttcgttcagttggcaagggacttaaaattggggccttatgtagatcattactatagagactacccaacgcttgtcagaactactggacnagtgtgcacaattgatccaggtcaaacaggatttatgcatcntccatcattttttacctctgagccnccaagtatttatcagtgggtgagttcttgtctgaagggtgaaggaatgccnccttatccttacctccctggaatctgtgaaagaagcngacttgtagtcttgagtattgcactgtacatacttggtgatgagagcttgntttctgatgaatcctcacagtatttaaccccaataactatacccccccnnaagttgccagtagaacaagaggaaaaca

SEQ ID NO: 7485 - DNA, 176 bp, Homo sapiens
  unsure (14): n=A,T,C or G
  unsure (27): n=A,T,C or G
  unsure (49): n=A,T,C or G
  unsure (65): n=A,T,C or G
  unsure (77): n=A,T,C or G
  unsure (79): n=A,T,C or G
  unsure (90): n=A,T,C or G
  unsure (125): n=A,T,C or G
  unsure (138): n=A,T,C or G
  unsure (147): n=A,T,C or G
  unsure (157): n=A,T,C or G
gctatgacctggantttgctaacagcnccatgaagatccctgaagctgncaaggtgtcccattcnacagcacagccncntgcctctgcantacatctaccccctgtttctggagcacgatctcancctgggaaccctngacctccgncgcgaccacnctaaccccaattccagcac

SEQ ID NO: 7486 - DNA, 180 bp, Homo sapiens
  unsure (120): n=A,T,C or G
  unsure (147): n=A,T,C or G
  unsure (169): n=A,T,C or G
gtacctccttatactgagtgtgaccaccctcagcctcttgctcgccccggtgctgtggagagctgcaatcaccgaggtgtgtgcccagaccggagagacggtccagcctctgatggctcngagatgatggaccgtggaagggaagcntctgtggggagtgagcgcttanatggccagcag

SEQ ID NO: 7487 - DNA, 224 bp, Homo sapiens
  unsure (31): n=A,T,C or G
  unsure (51): n=A,T,C or G
  unsure (59): n=A,T,C or G
  unsure (71): n=A,T,C or G
  unsure (141): n=A,T,C or G
  unsure (162): n=A,T,C or G
  unsure (179): n=A,T,C or G
  unsure (188): n=A,T,C or G
  unsure (209): n=A,T,C or G
agccacatgctgggccctctaggtctctccngcccactctaaggacccaanaaatgcanccccagtccatntctcttttttctctccttccgggggaccaaggtaccttctggggcatacaacatggcagcagggccctcnggaagaggggtaggaggaccnagcaccattctctgtanaggaagacnggaaaggagaccctcttggcncacatttatggaggg

SEQ ID NO: 7488 - DNA, 176 bp, Homo sapiens
  unsure (74): n=A,T,C or G
  unsure (90): n=A,T,C or G
tcccagggcacacactgttcttgcccttttctccattggggttggatttaaagatcacataggtggctgctcanaggagctgaggagaanctccatcctccccatgcaccttcaccaggtggcctaaagagcttccctgaaccccacactcagtagcaagatgaggcttcattctt

SEQ ID NO: 7489 - DNA, 352 bp, Homo sapiens
  unsure (59): n=A,T,C or G
  unsure (63): n=A,T,C or G
  unsure (82): n=A,T,C or G
  unsure (135): n=A,T,C or G
  unsure (145): n=A,T,C or G
  unsure (158): n=A,T,C or G
  unsure (179): n=A,T,C or G
  unsure (221): n=A,T,C or G
  unsure (229): n=A,T,C or G
  unsure (262): n=A,T,C or G
  unsure (286): n=A,T,C or G
  unsure (346): n=A,T,C or G
cctgagactggatctgttcaaacagcaaacgcccacagatggcccagaggtggtggtantcanggtgtgtgggtgtttttanggttctttactgttgtttctttcacccaggggtggtggtcccacccagtttgntgctgacggngacaggaaattanaatctgtttgcaaattgtccnacccacccccctcaacatgaggggcttccattttctgtgttntgtaaggnaactgtttccttcatgcccccatgttcctgatnttacttctgatttctttttaaccnatgttatcatgattaacaaaatttccccccctttaatgacctccgccgcgaccccctaancccaat

SEQ ID NO: 7490 - DNA, 382 bp, Homo sapiens
  unsure (57): n=A,T,C or G
  unsure (104): n=A,T,C or G
  unsure (105): n=A,T,C or G
  unsure (155): n=A,T,C or G
  unsure (159): n=A,T,C or G
  unsure (161): n=A,T,C or G
  unsure (194): n=A,T,C or G
  unsure (229): n=A,T,C or G
  unsure (235): n=A,T,C or G
  unsure (240): n=A,T,C or G
  unsure (277): n=A,T,C or G
  unsure (295): n=A,T,C or G
  unsure (314): n=A,T,C or G
  unsure (318): n=A,T,C or G
  unsure (340): n=A,T,C or G
cctgcaataaccatctcacctataccctgcaagaaaggaacagttgcttgcggccanccccctgttgtagaaaatgccaagacctttggaaagatgaaacctcnntatgaaatcaactccctgattagataccactgcaaagatggtttcattcnacgncnccttccaactatccggtgcttacgaaatggaanatgggctatacctaaaattacctgcatgaaccccntctgcntaccnaaggacttattctatgaaatactttaaaaattcctcntcaccaaaggacaattcnataaatacctcccaacctnatcntccttggagcccgaggtggcangagtccacgccctgatccctaaaatggccaacatgtgttttc

SEQ ID NO: 7491 - DNA, 117 bp, Homo sapiens
  unsure (13): n=A,T,C or G
  unsure (28): n=A,T,C or G
  unsure (80): n=A,T,C or G
  unsure (92): n=A,T,C or G
aaaataaaaatcntcaataattttatcncccaccaaacaatcacttttaatgtgctggtacaggttagtctattttaacntttctgaaatcntatacatttacatgattgttctcac

SEQ ID NO: 7492 - DNA, 101 bp, Homo sapiens
  unsure (6): n=A,T,C or G
  unsure (15): n=A,T,C or G
  unsure (38): n=A,T,C or G
  unsure (79): n=A,T,C or G
  unsure (82): n=A,T,C or G
  unsure (84): n=A,T,C or G
  unsure (85): n=A,T,C or G
catgancaccctgcnataattagagtttccccaataantttacccaactatcaacctttattactacttatggcttatngtntnntttaatgtctttttta

SEQ ID NO: 7493 - DNA, 160 bp, Homo sapiens
  unsure (27): n=A,T,C or G
  unsure (69): n=A,T,C or G
  unsure (85): n=A,T,C or G
  unsure (126): n=A,T,C or G
gtaagactaaatatttccatgtgaaantcttccgacatcaacttgaaagagaaatttgtaaggaagaangtcattaccatatctnattactctgaatgtaaaggagtaatggaaataaaggaaccntcatctgtgtctgactttaatcaaaattttgagg

SEQ ID NO: 7494 - DNA, 184 bp, Homo sapiens
  unsure (56): n=A,T,C or G
  unsure (120): n=A,T,C or G
  unsure (135): n=A,T,C or G
  unsure (146): n=A,T,C or G
ttcagcgagggaccatcaactgcaactttgcgggggttgccttgggtgattcctgnatctcccctgttgattccgtgctctcctggggaccttacctgtacagcatgtctcttctccaanacaaaggtctggcanaggtgtctaangttgcacaccaagtactgaatgccctaaataacgggct

SEQ ID NO: 7495 - DNA, 297 bp, Homo sapiens
  unsure (29): n=A,T,C or G
  unsure (67): n=A,T,C or G
  unsure (109): n=A,T,C or G
  unsure (178): n=A,T,C or G
  unsure (182): n=A,T,C or G
  unsure (251): n=A,T,C or G
  unsure (262): n=A,T,C or G
  unsure (280): n=A,T,C or G
  unsure (284): n=A,T,C or G
aaaacccaaactaggctgatactcctgtnttgacctgaggtcattctgtgcctgtcaaaccaaatancacattcaatcttttgtatattttgaagactcacaaacccanaaatttttacaacctctttctcactctaattaaaacctactgctctgtcaatgggaaagaatgagtccnaacnttctgaaaaccgtacaaatgtgtttacattttagtgggggcttcctgcatctttaacctctttaaattnacatacgtaanatcttgtgtaataacccntttncaaatatgcagat

SEQ ID NO: 7496 - DNA, 111 bp, Homo sapiens
gtagtaaaaaaaaaactcaggctgtctttctggaactttcatgctacatggaattaactgttccaactgggtagcaaatgctatggtcactgacataataaaggactcacc

SEQ ID NO: 7497 - DNA, 134 bp, Homo sapiens
  unsure (58): n=A,T,C or G
  unsure (111): n=A,T,C or G
atggtctccgatctcctgacctcatgatcccgccaccttggcctcccaaaatgctggnattacaggccgtgagcgaccgcccccggccaattcaaactatctttttaaagntatatgagtgatggaatgctaac

SEQ ID NO: 7498 - DNA, 101 bp, Homo sapiens
  unsure (7): n=A,T,C or G
  unsure (20): n=A,T,C or G
  unsure (25): n=A,T,C or G
  unsure (85): n=A,T,C or G
  unsure (98): n=A,T,C or G
tgtaatngtgggttctgatnatacncatagcccctaattgacagcctttagtacttgttaccttctgttctaagagttttatgtntattaactcaccnaag

SEQ ID NO: 7499 - DNA, 392 bp, Homo sapiens
  unsure (18): n=A,T,C or G
  unsure (46): n=A,T,C or G
  unsure (88): n=A,T,C or G
  unsure (100): n=A,T,C or G
  unsure (163): n=A,T,C or G
  unsure (170): n=A,T,C or G
  unsure (207): n=A,T,C or G
  unsure (216): n=A,T,C or G
  unsure (243): n=A,T,C or G
  unsure (245): n=A,T,C or G
  unsure (252): n=A,T,C or G
  unsure (268): n=A,T,C or G
  unsure (271): n=A,T,C or G
  unsure (273): n=A,T,C or G
  unsure (292): n=A,T,C or G
  unsure (298): n=A,T,C or G
  unsure (302): n=A,T,C or G
  unsure (331): n=A,T,C or G
  unsure (332): n=A,T,C or G
  unsure (354): n=A,T,C or G
  unsure (355): n=A,T,C or G
  unsure (378): n=A,T,C or G
  unsure (379): n=A,T,C or G
atggaagagccgggaacngagaagtgtggggaagagataggaaccngcaggatggcaggggcaaagggctcaagggtgaggaggccantgggaccccacngagttggggagataaaggaacattggttgctttggtggcacctaagctccttgtctgtctccngcacccngaatctcattaaagcttatttattgtacctccaccgnctgtgtgcnatggggtcttttgtggaaatcaaggancncacaggnttcatgtgtactgtcnccncntgggatggaacccgaggcntggaancaanaccctaaatgaagagggcctaacggctgnnattccccgcccccttacgaacnncttgtctttttttttcctctccnnaaaaaatgtttaa

SEQ ID NO: 7500 - DNA, 350 bp, Homo sapiens
  unsure (27): n=A,T,C or G
  unsure (30): n=A,T,C or G
  unsure (33): n=A,T,C or G
  unsure (76): n=A,T,C or G
  unsure (139): n=A,T,C or G
  unsure (165): n=A,T,C or G
  unsure (180): n=A,T,C or G
  unsure (183): n=A,T,C or G
  unsure (202): n=A,T,C or G
  unsure (219): n=A,T,C or G
  unsure (230): n=A,T,C or G
  unsure (232): n=A,T,C or G
  unsure (242): n=A,T,C or G
  unsure (271): n=A,T,C or G
  unsure (272): n=A,T,C or G
  unsure (288): n=A,T,C or G
  unsure (296): n=A,T,C or G
  unsure (298): n=A,T,C or G
  unsure (316): n=A,T,C or G
gggacatctatttggggatcaacatcnccnacngcgaggaagtggcagtgaagctagaatctcagaaggccaggcntcccccagttgctgtaccagagcaagctctataagattcttcaaggtggggttggcatccccncatacggtggtatggtcaggaaaaanactaccatgtactantcntggatcttctgggacctancctccaagacctcttcnatttctgttcnanaaggttcacnatgaaaactgtacttatgttagctgaccnnatgatccgtagaattnaatatgtncntaccaacaattttatacnccgagaccttaaacccgataacttcctaatgggt

SEQ ID NO: 7501 - DNA, 104 bp, Homo sapiens; identical to SEQ ID NO: 428
  unsure (31): n=A,T,C or G
  unsure (58): n=A,T,C or G
  unsure (72): n=A,T,C or G
  unsure (96): n=A,T,C or G

SEQ ID NO: 7502 - DNA, 117 bp, Homo sapiens
  unsure (46): n=A,T,C or G
  unsure (76): n=A,T,C or G
aagcgtgcatggcagaagtggagagtaagtaacacccaacaagtcngggtgggcactggatcaattttggggaccngatggaccccagtgggaatgctggctctgccactgcaatgc

SEQ ID NO: 7503 - DNA, 373 bp, Homo sapiens
  unsure (51): n=A,T,C or G
  unsure (76): n=A,T,C or G
  unsure (130): n=A,T,C or G
  unsure (146): n=A,T,C or G
  unsure (179): n=A,T,C or G
  unsure (197): n=A,T,C or G
  unsure (233): n=A,T,C or G
  unsure (242): n=A,T,C or G
  unsure (246): n=A,T,C or G
  unsure (277): n=A,T,C or G
  unsure (299): n=A,T,C or G
  unsure (358): n=A,T,C or G
  unsure (371): n=A,T,C or G
  unsure (373): n=A,T,C or G
gtcaagtatacggtatgctctcaaaaaaatgttagctgtggtttttattgncttattataattagtaattctttcnaattaataatataagcttttacacacatatcataaaagttattaaaattattanagatattttgagtagngacgctgaagaaagtaaaagtggaattcctaantcatacttgaaagtatcnattatatttatagaagatcagtcctactttcaaccnccaagcccngcangaattgaaaacccactggtcaacatatgtcnatgcacatggaaaaaggatacnactgtctttaaattccctaaagaaagctgagtggagagccttctggtcactgcagtccnacctatcattacncn

SEQ ID NO: 7504 - DNA, 409 bp, Homo sapiens
  unsure (66): n=A,T,C or G
  unsure (100): n=A,T,C or G
  unsure (197): n=A,T,C or G
  unsure (212): n=A,T,C or G
  unsure (238): n=A,T,C or G
  unsure (282): n=A,T,C or G
  unsure (294): n=A,T,C or G
  unsure (336): n=A,T,C or G
  unsure (337): n=A,T,C or G
  unsure (393): n=A,T,C or G
  unsure (397): n=A,T,C or G
ttaggtggttttagctcttatctggggtatgaaagcaatttagctcatctcacagaaacaaaagcnggtgctgaatcatgaaaacctcaattatttttancatgcctcttaatttttctttcccctggtttcttgtcgtctgtgcttgattcttgaacaggtaaccacttgagaggatgccggcgatagatgggccntggaggaagtgtcancaaacatgaaaaagcaaatccggccntaactatatagacagtccaccccaactgttcagccacgtacccntagataaatccnactattgcagaaaaaagaataattccctgaaacatctgttcnnctagcttctggcccttgtaatccatctgctgggcagcgagctcagatgctccagcntggntggctgaggagg

SEQ ID NO: 7505 - DNA, 321 bp, Homo sapiens
  unsure (60): n=A,T,C or G
  unsure (87): n=A,T,C or G
  unsure (105): n=A,T,C or G
  unsure (112): n=A,T,C or G
  unsure (149): n=A,T,C or G
  unsure (165): n=A,T,C or G
  unsure (224): n=A,T,C or G
  unsure (234): n=A,T,C or G
  unsure (290): n=A,T,C or G
  unsure (292): n=A,T,C or G
  unsure (296): n=A,T,C or G
  unsure (313): n=A,T,C or G
  unsure (314): n=A,T,C or G
ctttaagaatgagagcctgggcatggcctttctgcacctctgtcacctccctctccgccntggcatcccccctggaggaggtggccntatgtgtaacctgtaccnaattaanctgttttaaatttacagactacaagcaactgaacccnaatgtctaaatgtacnttcttttctgtactacatttcacctaatattgcagaactaatgacaattttaaaagttnctattacccnattctgtctactgtagcaagataccttaagttacaaccaaatcttacctgccccgncngccnctccaagccccaattcnncacccct

SEQ ID NO: 7506 - DNA, 191 bp, Homo sapiens
  unsure (101): n=A,T,C or G
  unsure (117): n=A,T,C or G
  unsure (165): n=A,T,C or G
gagtgaacagccccgcttggctgtggcatctcagtcctatttttgagtttttttgtgggggtacaggagggggccttcaagctgtactgtgagcagacgcnttggtattatcattcnaagcagtctcctcttatttgtaagtttacatttttaccggaaactacnaaattattttgggtgggttcagccca

SEQ ID NO: 7507 - DNA, 441 bp, Homo sapiens
  unsure (36): n=A,T,C or G
  unsure (417): n=A,T,C or G
tcaggtgattatcctgaaccatccaggccaaataancgccggctatgcccctgtattggattgccacacggctcacattgcatgcaagtttgctgagctgaaggaaaagattgatcgccgttctggtaaaaagctggaagatggccctaaattcttgaagtctggtgatgctgccattgttgatatggttcctggcaagcccatgtgtgttgagagcttctcagactatccacctttgggtcgctttgctgttcgtgatatgagacagacagttgcggtgggtgtcatcaaagcagtggacaagaaggctgctggagctggcaaggtcaccaagtctgcccagaaagctcagaaggctaaatgaatattatccctaatacctgccaccccactcttaatcagtggtggaagaacggnctcagaactgtttgtttcaattgg

SEQ ID NO: 7508 - DNA, 548 bp, Homo sapiens
  unsure (28): n=A,T,C or G
  unsure (57): n=A,T,C or G
  unsure (226): n=A,T,C or G
  unsure (273): n=A,T,C or G
  unsure (328): n=A,T,C or G
  unsure (334): n=A,T,C or G
  unsure (346): n=A,T,C or G
  unsure (361): n=A,T,C or G
  unsure (380): n=A,T,C or G
  unsure (399): n=A,T,C or G
  unsure (467): n=A,T,C or G
  unsure (471): n=A,T,C or G
  unsure (492): n=A,T,C or G
  unsure (520): n=A,T,C or G
  unsure (540): n=A,T,C or G
gacaatatcctggttaatgaatccaaanctattttaaagctttgcgattttgggtcngcttcacatgttgcggataatgacacaacaccttatcttgtcagtagattttatcgtgctcctgaaatcattataggtaaaagctatgactatggtatagatatgtggtctgtaggttgcaccttatacgaactctatactggaaaaattttattccctggcaaaaccnataaccatatgctgaagcttgcaatggatctcaaaggaaagatgccnaataagatgattccaaaaggtgtgttcaaagatcagcattttgatcaaaatctcnacttcntgtacatagaanttgataaagtaacanagagggagaaagttactgntatgagcaccattaatccnactaacgacctgttggctgacttgattgggtgcccgagacttcctgaagacccacgtaagaaagtacnccanctaaaggacttgttgggaccncattctgatgttggacccccctaaaccnaattagccatcaacccaggncccctacc

SEQ ID NO: 7509 - DNA, 476 bp, Homo sapiens
ccttattaaagagcaacttctatttccagtcgggggagtaacactaaagctacaagaaatatgtaataatgataggtaataatgtgttccaaagctttttcaaactagaataaggaggcaaatagaagaatgagatactgatgtccacagttcattggcagaatctaaccccttctgttatcttttttaatactatttttgtttagatagaagtttcaaagaagataaaaatgcttgaagagcctgagagtaaaaagattatgctgcaaagctatgatataaactgctcttgcagtccaaagggatacctgattaaagaagtttcttatttaaacatctcagacgcaaaaattacattaaatttttgtatatttcaacaacattttaaatgtattttgttatgtttgtattatataggataaagcaaatgtcaagttaaaatgtattgtgttgtttgtaaagtaagaagttactgg

SEQ ID NO: 7510 - DNA, 476 bp, Homo sapiens; identical to SEQ ID NO: 7509

SEQ ID NO: 7511 - DNA, 642 bp, Homo sapiens
  unsure (535): n=A,T,C or G
gagggtcaatagtgcagtcagtggtgacatttttctttattttgcaaaatgcttttaaaaccaaaggctgctctagttgatggacagtatcagtcttgatctaaattgtaggacactttttcatgtaacataacatttggggattgggtttatttagtgtaatgaagataatttgatataaaaatattttgtgtatatatatatatttttactttgttttctaaattgctgtttgcagtaacagtaagcgcaaagcaaaatatataagttatgactgtatgatcagatgaagtatgagttcttttggtttgcatccttaaatagttagagatctctgataaaaactttggaatctttgcaaaacaatacaaaaatgccaaaatgtgagcatgtcaatgaaaactaaagacaaatacttcactctttttcatactattataagttattctggtattaaatatgttaataaaagtgtttttgtttttacatatttcagttaaatgaatgaatgctggttgtattttatttgaatgangtcatgattcatgtttgccatctttttaaaaaaatcagcaaattcttctatgttataaaattatagatgacaaggcaatataggacaactattcacatgattttttt

SEQ ID NO: 7512 - DNA, 251 bp, Homo sapiens
tcggggtcagctagtgtcctctctgctcggccgcgggctcccggaggactgcaggcaggatgacgcaaaacacggtgattgtgaatggagttgctatggcctctaggccatcccagcccacccacgtcaacgtccacatccaccaggagtcagctttgacacaactgctgaaagctggaggttctctgaagaagtttctttttcaccctggggacactgtgccttccacagccaggattggttatgagcag

SEQ ID NO: 7513 - DNA, 636 bp, Homo sapiens
ccatcttaagttaaagaccctttatcataaaatatatggttttaaattttactcaaattgaatttataatccctatgacttccctacatatacataacaaaagagtgtagtaaaattagcaaatactaaactatattgataatttatcattcttagtttgtggtttttagaaacagtacacgcacctaatatatgtcgattccttggcttattagttgcagtgtacaatgcaacaaaatacaaaatacatgcttggtgaacattcgttcatatctacaagacggcagctagagattaggtttcaatactgaccatttactatcctacaagcaattagcattacatcataatatgccatcaaggcaactttttttatactgaaaaaatcaaaataaaaaccgttatttgtaaacttttatacgaaatgtaactcttcaagtggaaataaaaaataaaatttgtctatttactattgaatacacataggatttcaattttcattataccgagaaaaaagctcttttgtgttgggaaaataatgcttcaaaaaataattagtagaaaaacccctagtataatgttttgtcctttcaatgccagcacagatttgggaacatactggaggatgaagttata

SEQ ID NO: 7514 - DNA, 640 bp, Homo sapiens
ccaactctagtcatacttggacctcgtggaaacatgttgttttctttgattggagagggacacaaagataaattatttttatatacttcaattgctttaaagtattacaaagacagggagcagatcagagataataaaattggaataaaactctataaagattctttgccaccttcaccattgctatttcctggcaaagtaacagtagaccaagttactgatagattggtaatagcagacactggacatcatagaattttggtcgtttggaagaatggacaaattcaatatagcattggaggacccaaccctggaagaaaagatggaatattttcagaatcaacttttaattctccacagggtgtagccataatgaataatatcatatatgtggcagacactgaaaaccaccttataagaaagattgacctagaagctgagaaggtgagcactatagctggtattggaattcaaggtacagataaagaaggtggagcaaaaggagaacaacaacccattagttccccttgggatgtagtttttggaacatcaggttcagaggtccaaagaggtgacattttatggatagccatggcagggactcatcagatatgggcacttctgctggactctggcaaac

SEQ ID NO: 7515 - DNA, 383 bp, Homo sapiens
ctgtagagtgggcttatcatctttcaacacgcaggacaggtacagattcttttccttgaggcccaaggccacaggtattttgtcattactttcttctccttgtacaaaggacatggagaacaccacttgttgctccatatcctgtccctggaggtggagagctttcagttcatatggaccagacatcaccaagcttttttgctgtgagtcccggagcgtgcagttcagtgatcgtacaggtgcatcgtgcacataagcctcgttatcccatgtgtcaaagaagataggttcttcttcaaagatgaagggaaagaaggtgctcaggtcattctcctggaaggtctgtgggcagggaaccagcatcttcctcagcttgtccatgg

SEQ ID NO: 7516 - DNA, 301 bp, Homo sapiens
ccagtcggggtactgttcggacaggctggaggagtggctgtctctgccttggctggactgagatgcagaaccgctggagccccacgaggtgtctccctggtggactgtcccattctccaacagactgcttttctcctgagctttttcctccatgacgggctcgcagctaagcctgggcagctttgctggcccgaaggactcctgtttggaattaaatgtcactggtgacaataagggcaacatgagagcttgggatcctccaatggtcgggagggagatggcatttttgagcaccggggag

SEQ ID NO: 7517 - DNA, 582 bp, Homo sapiens
  unsure (4): n=A,T,C or G
ctgntgtcatttacatggtggacccgttcacgtatgctgcagaggaggactccacttctgggaacttttggctgttgagcttgatgcgctgctacacagaaatgctggataatttacctgagcatatgagaaattctttcattctccagattgtgccttgccagtacatgctgcagacaatgaaggatgagcaagttttctacattcaatacttgaagtccatggcattttcagtgtactgccagtgcaggcgaccactgcctacacagatccacattaaatccctcacgggatttgggcctgcagccagcattgagatgaccctcaagaaccctgagcggcccagcccaatccagctttactcccctccctttatattggccccaatcaaagacaagcagacagagctgggagagacgtttggtgaggcgagccagaaatacaatgtgctcttcgtgggctattgtctgtctcacgaccagcgctggcttttggcttcctgcactgacctccatggggaattattagagacctgcgttgtaaatattgctttaccaaacaggtcacggaggagtaaagtat

SEQ ID NO: 7518 - DNA, 306 bp, Homo sapiens
ccaatgagatcattgtgaaggcaggggaatgtatgtgcacatctgttttgtaactgtttagatgaatgtcagttgttatttattgaaatgatttcacagtgtgtggtcaacatttctcatgttgaaactttaagaactaaaatgttctaaatatcccttggacattttatgtctttcttgtaaggcatactgccttgtttaatggtagttttacagtgtttctggcttagaacaaaggggcttaattattgatgttttcatagagaatataaaaataaagcacttataaaaaaaaaaaaaaaaacc

SEQ ID NO: 7519 - DNA, 191 bp, Homo sapiens
ctgcaagataatgaggcacactcagtattgcacttcattaaaatttcaggctcaaacttaacctagaagtttaaatgaaattgcatttgtaatttagtaattcttatacaggacaaacattgatatgtttatatacagtgtgatacttattacatttatatgctgtcctaacacaatgttttttttttttt

SEQ ID NO: 7520 - DNA, 565 bp, Homo sapiens
  unsure (545): n=A,T,C or G
ccacatttaagtcttaaaaatttttaaattttgttgttgatgtttgtagacagccctgttgttgaaatcatggctttattcattttatttattttttaaacttgcctgaatttgttctaaaggaatatttaagagacataattttcttctctttaccataacattacacaaaactttttcctaaaacacggttgtgaggtactgatgaggtgtaagtggagctgttaaaaacagcagtgctgtattgcagttatgtatattcgtgtacagtatgtttagatcccaggtaaacatattcttttctgagaggataaatacctgcattcagatattccaggtaaatataattgagtcagggagtagtaaatctgatggagaattcactttggggaggggaaaaagaatagtatgcaagacccttattggcttttaattatacctgaaaccaaaatggatatttttagtctctctgcatgtgagatttggtgtaacaagatagaactataatatatacagtatatggaaggatagatatagtgctttgntcattttaattgcaaagctg

SEQ ID NO: 7521 - DNA, 403 bp, Homo sapiens
ccacagaacagtccctttttgagtaaagcagcaaggttgcttaatgacatgctatgtggttaacaagattcaactgccacatcaaggactttaaataatttcaagattttaaatgtatttatgaaatgaactcattacagcagctaatcaatgcaaactttgtcctttttctttgtctttctaagagaaactgaatttaatttaaatttaaattacagtgtctaaaacttggtaaaatattttaaatttgaataagaggaaaaaaaaaacatgaatttatttatgatggagcttcatacccaggacagtagcttcttaaatgttagtaaaataattatgttaagcattaaaacaattttgaatatgtaattaagcatttatgttaaaaaacatgtttcttacg

SEQ ID NO: 7522 - DNA, 350 bp, Homo sapiens
  unsure (344): n=A,T,C or G
tggagtaagtctggcagtatgttcaaggttgtggagtgtaactccagaattttccttcttcagctcattttgtctctctcacattaagggagtaggaattaagtgaaaggtcacactaccattatttccccttcaaacaaataatatttttacagaagcaggagcaaaatatggcctttcttctaagagatataatgttcactaatgtggttattttatattaagcctacaacatttttcagtttgcaaatagaactaatactggtgaaaatttacctaaaaccttggttatcaaatacatctccagtacattccgttcttttttttttttttttttttttttnaaaaaa

SEQ ID NO: 7523 - DNA, 281 bp, Homo sapiens
ccaattgatttgatggtaagggagggatcgttgacctcgtctgttatgtaaaggatgcgtagggatgggagggcgatgaggattaggatgatggcgggcaggatagttcagacggtttctatttcctgagcgtctgagatgttagtattagttagttttgttgtgagtgttaggaaaagggcatacaggactaggaagcagataaggaaaatgattatgagggcgtgatcatgaaaggtgataagctcttctatgataggggaagtagcgtcttgtagacc

SEQ ID NO: 7524 - DNA, 500 bp, Homo sapiens
  unsure (452): n=A,T,C or G
cctgtttgattgtagctatgttggtgtatctcgtgtacaagatggaaaagtgcttttgttgttctacctgatccagttgggggagcaggaatagggggtgcctgcctaacggcctctagcccatgtgcttatactgggatctgtcccgagggatctgcacctggttggcagtcattttgtggtggacgtggtaaatcgcgagtgttaccatgatgacgaggcccaagatgagccccaaaatcaggggcaaggtttcttccagttgctcccgctcatccactgggcatttatgctcttcactgaagacaaaatctgagataatgtcaaaaggttggatgtggaccgcagacaggatcatggtgaccgtcttctgcggatcactagaggccagtgaaatggtttgttgagcttgacactcataggacttcccagcgggggtgaccaaggcaganaggtggtgcgagttggctgtgtgcttccaacactgactgcgtctttga

SEQ ID NO: 7525 - DNA, 304 bp, Homo sapiens
ctgttaaagagtggaggacacccttgaccctaacaaggaaaacaaattaagcctttatgtacaagcaaatttagagctcttttaagtgtccaaagctattaattagtttaattaaggcattaaactaattctgaattaacatttttataaccaagaactaaaatgttcaaattttttctagtacaaaaaaattaaatttgctttagttataaaagagctctgtcaatatacacaaactatatacttcagacattcacaaaaatgtgagcagaaggcttatcaaaagacatttaatacaattagt

SEQ ID NO: 7526 - DNA, 436 bp, Homo sapiens
  unsure (214): n=A,T,C or G
  unsure (391): n=A,T,C or G
  unsure (436): n=A,T,C or G
ccacgtacatcctcccccagaaataggataaataaagagtattaatgagaattaactgccttgagacatttctattatttcttgttgagagaaccattcctaaagtcttcttgatcactattagcatatggacattataaaataaataacctgacaacttgacctgcagttcctggaggatgagtaaacaaaactgatgttaacccactgagtncactcttgtaagagtaatactgtagtgatgagagtactcccacatacacaaacatcacagtaaaaggtgcctatgattttcaacttcattgttcaaataaagggttcgctaagtgatcacaagacagcaggcttggttgcttccacatattgacttcctagagattacatatgaagnttaatctggtctggctgtacactatatgtgtataacggtgagtan

SEQ ID NO: 7527 - DNA, 534 bp, Homo sapiens
ctgggatcatgcaagaggcagtaccttcctctctaagtcatagcagtgaataggaagacaagaaaaactgtctttcgagcaccctatatccaagtcagaattctgaaggttttttccagtagatccaatgctataatggttaggttcccaggctagcctaaaaaattccacttacccaaaataatccttttcattttgcagaaataaattttgtgagatagtttagaaacctaccatcatttagtccttcattttttaagaataattctaaatatgtactaccaattaacaataaatgtagggagttagggactaaatgtaaggtaaataaacacagccaaatcttttctctacctattctcccagaagctccattaatactaatctgtatcttttctcgtaggttcaccatcaaaacttatcaaatgagtgtgaagacacacacatggacacaaacacacacacaaacgcatgtgcacgaagcttcatttctgaagtgaatctgtagttgagtttttaaggatgtccctggca

SEQ ID NO: 7528 - DNA, 562 bp, Homo sapiens
ctggcaatgacaagactgggagtatcaaactaggattgttagttcaattaaaatttcagataaacaataatgtacttatactaaaaaattatttgttgtttatctgaaatgaaaatttaactgggtacccaattgtttgtttgtttaatctaaaaaccctgattgaaatttatctaataaaacatcatttaatatctaaaataaaataaatttactataacatctttataactattcaatcaatgattcatcttctatttttccaaattcttgcacaaatatttgatgcttaaataaatacataaataataaataggttaataagttacacttgaaaataatttatgttatgatgaaaaaacttaaagtgcttccacatgtcctcacaacatcactgtgaggtaagatggtggctaatactttttccacttagaaataaaggagaaaccaaggcacagtggaacaaggacttgtggatcctggctagcagactaggggttgccagatttaacagaaaaaaatccaggatttccagctaaatttgactttatggcaaaattta

SEQ ID NO: 7529 - DNA, 616 bp, Homo sapiens
  unsure (561): n=A,T,C or G
ccaagatggttggggcataccttggttttatacattttagggagacataagacattaatcaatatatgtaagaagaacattggttcagtggggagggagcttccaggtcacagataggtgagacacaaacagttgcattcttttgagtttctgattagcctttccaaaggaggcaatcagatatgtatctatctcagtgagcagagagataactttgaatagagtgggaggtgggtttgccctaagaagtttccctaagcttgagttttccttagtgattctggggccccaagatattttcctgtcacagttgacatccccaacacagtgtttagggctcagaaaaagataccctaaaatagggtgctttggcatgctgaatgctttgaataaaggaggctgaagggcctcagaaataagagaacaaaggtctgtctctgacccactgctgcccacctcccttcccttccaaagcacagggagggattttctttgaagttctcttatttgattaagggaagtttcttccagaaggaaggtaattgtcctggacaccccttnctgggaatctacatcgatcagagaagaataactcatattgcaggacgggagaata

SEQ ID NO: 7530 - DNA, 554 bp, Homo sapiens
ccaagtaaatttgagaaatgaattaaaattaagaccattcattgcaggactcttcaatgtccttaatgtgtgttgtgatctctaagggtggttatgggggtatgatatgaagtatttcccaaacttactttaccctggaacccttcagtggaccacctctggggattaatgttcaatgggaacacattttgggaaaggctgtccaagcatacacttttgtgttagatacaattaaaaatgacatctaaggttaagaaatgacaaaacatggcaagaatatgttttagaaatggtaatgttcacttaaaaatactaatcttctaaaactataatatttaaccagcactgagtcagtttgtaacttgatatggaaagagtaagcaagcccaaatggcccattttacccgaacaaaaagtgagagaagactttatattaacatattagtctgaaaaaaaatttgtgcttaagtgtgccaaggaggtaaaggataagaaaggcaagacagttttctggctgccgtgtgatggctcacacctgtaatcccagcactttg

SEQ ID NO: 7531 - DNA, 445 bp, Homo sapiens
  unsure (18): n=A,T,C or G
  unsure (40): n=A,T,C or G
  unsure (46): n=A,T,C or G
  unsure (52): n=A,T,C or G
  unsure (70): n=A,T,C or G
  unsure (74): n=A,T,C or G
  unsure (92): n=A,T,C or G
  unsure (96): n=A,T,C or G
  unsure (99): n=A,T,C or G
  unsure (161): n=A,T,C or G
  unsure (167): n=A,T,C or G
  unsure (196): n=A,T,C or G
  unsure (221): n=A,T,C or G
  unsure (271): n=A,T,C or G
  unsure (343): n=A,T,C or G
  unsure (427): n=A,T,C or G
  unsure (430): n=A,T,C or G
ttctctggtaaatgcttngattgctaaatagtgatggtanatgaanacaaantaatagggggccaagctnttgngaaacaaaggtataggtntggnttncattgctctggaaattttactctcattcctgaaaagcataagcagggatgaaaaatagcttntaaaantttactttccttccagaaataaaggatcnattcctacctgtccaaaactttcanatggagtagtaggttccggtaaaaatttctatcttgacttcagttcccanagaggtttgctcttaagaagcgtatgaggtgactttggaacaaggaatatgcatgaccaacatctggtgtanacagagtctgggtcctgaaaatgtcagcaaatgagatttacaatattagagcttggaaataacctcagaaaacatctagaccangcncattacatcacagat

SEQ ID NO: 7532 - DNA, 663 bp, Homo sapiens
ccataatcctagatgcacgcttctaattcatgtacctgcacatgtgacctttgtgaacagaaatttgcatgtataatttgtgtttacttgtaactttctggttatatactgcttatatctgtggattcaagttactgaagtgaataccaataaaaagaaaaccctaggccatgttaattggttatacatgtttggaatattaaccaacgtatttgtcagttgtggtttttattcgctcttaaactttgtgcatgctttaacaatttattacttttaaatctagagtgaattctaaagactgccgctaaagatctgagttttaaaaatgttgttgctggtggatttcttgttcctgttacataactaaaagtgaggccatttgtggtttttaaaaaccttatgaattaaaaatgctacaggtgaacaaacagaagcttatgtttagagatattgatgacttaacagtacaattggaagtaatacggatgagcaagaattagttctgcagcttttcaaaataattacgtagagactcttggtatattggattatctgttgtaaacaattttttttcttccctgacacagggtctcactctgtccccagactggagtgcagggcacagtctctgcacctcacctttgggctcaaatgaccctccta

SEQ ID NO: 7533 - DNA, 608 bp, Homo sapiens
ctgggaaatactttatttaagatattttatatggttttctcccttttacagaatgaaacagtgattcagagtgcatataaaagcctcatacaacacttggaagaaataagggttttagtattagcaactcattttgaacatttgaaatggaatgatatgatggaagaggtattaaaatttttatttctttaaataaaagtttgatagaatttggtaaatgagaatgaacttgtgattagttcagtccttagaccagactaaagggtgccatatacctccttagtacatgtatactatctgaatcttagaatgtcatgctctcagagtaccttgaattcatcggatggcatatgtaattttatatgcatttccggaagccatattttaaaacagactctgggaaactagaaaattgtagtacttaatgcaacagtaatgtttattttccagtattcaaattgaggagggctctaagatatcatttgccatataaacggtcaaaatgtggaattaattataccttaagtctaattttctgattatcttctcaagctatgctttatactactatttatcatgatggattactaagaacctctttctttttt

SEQ ID NO: 7534 - DNA, 417 bp, Homo sapiens
ctgaaccctcgtggagccattcatacaggtccctatttaaggaacaagtgattatgctacctttgcacggttagggtaccgcggccgttaaacatgtgtcactgggcaggcggtgcctctaatactggtgatgctagaggtgatgtttttggtaaacaggcggggtaagatttgccgagttccttttactttttttaacctttccttatgagcatgcctgtgttgggttgacagtgagggtaataatgacttgttggttgattgtagatattgggctgttaattgtcagttcagtgttttaatctgacgcaggcttatgcggaggagaatgttttcatgttacttatactaacattagttcttctatagggtgatagattggtccaattgggtgtgaggagttcagttatatgtttg

SEQ ID NO: 7535 - DNA, 414 bp, Homo sapiens; identical to SEQ ID NO: 600

SEQ ID NO: 7536 - DNA, 620 bp, Homo sapiens
  unsure (618): n=A,T,C or G
cctatgtcacaggggagagaagctcctgaaccaaccatttgtcaggtctggggacaagactggaagtattgactcatttgcaaggaaactaagtgggtcaacaatgaaagaaggtaataggacctcatctgcaatcctccaatttatctgcaggataaattaaatgcctaaaaaagaaacttattttttaaagtatctgctaccatcaggaaaccaaataaatagtcagtctattaatttcgttcttaaataattccgatcctttacctaatttcttgagccatttaatcatctcaactctaccttaaaaccctcccaatgttttccaaatctgtcttactgggaaacaaagattaaaattcctaataaggattattttgtggatcttaatttctagattcccattttaaaattttaattccattaatttcttagtaatagaatgctattattaagaaattaatggaattaatttcttaataatagcattctattactgattgaatcatctctaataagccatcataatttccagaccatttctaagaacacgagctgatattgaaatgtttactagtgaatatagctaatgtaattactctttaaaacttaataggnta

SEQ ID NO: 7537 - DNA, 612 bp, Homo sapiens
  unsure (526): n=A,T,C or G
gttagtaataaatgtagccattacctattctactggttattagtacaaaaaaacccagccttttcagccattcatttccaaacactgatggtttccactgccagactatacacaagtttctaatggtccacagtaaattgagaatgagaacaatgcagtaaattattaataaaactacattcttttcttttttaaaaaaaatactatttgtcttatggtttaattataaacataattttacttaaaaaataaaaagcaaccttatttgaaaattggctggtaccaattttattttaataactttattgatctgaaatcttagtacgtttaggttaagttataaacacctacttcacttaggcactgggccaggaaaagaacataatggcatataagaactttccactggagtgcttcttcattcacttagataattactaacatccaccatactagacccctaaagtgatgaaacacacaataaatagcaatataggctattcagtaattacacctaggtaattcncgtcattttataataaaattatgattttagggaagtactccatgttctccatgagccttactctgatattcacttaccacacccta

SEQ ID NO: 7538 - DNA, 645 bp, Homo sapiens
ctgggaagccacgagaatattgtgaacctgctgggggcgtgcacactgtcaggaccaatttacttgatttttgaatactgttgctatggtgatcttctcaactatctaagaagtaaaagagaaaaatttcacaggacttggacagagattttcaaggaacacaatttcagtttttaccccactttccaatcacatccaaattccagcatgcctggttcaagagaagttcagatacacccggactcggatcaaatctcagggcttcatgggaattcatttcactctgaagatgaaattgaatatgaaaaccaaaaaaggctggaagaagaggaggacttgaatgtgcttacatttgaagatcttctttgctttgcatatcaagttgccaaaggaatggaatttctggaatttaagtcgtgtgttcacagagacctggccgccaggaacgtgcttgtcacccacgggaaagtggtgaagatatgtgactttggattggctcgagatatcatgagtgattccaactatgttgtcaggggcaatgcccgtctgcctgtaaaatggatggcccccgaaagcctgttttgaaggcatctacaccattaagagtgatgtctggtcatatggaatattactgtgggaaatctt

SEQ ID NO: 7539 - DNA, 481 bp, Homo sapiens
  unsure (377): n=A,T,C or G
ctgtgacagggcttttgtgtcccgccagactttgtacatagcataacctgtttaaatcccatatgatgcaggttccgtctctgctcacacttatcagtatactgtatggtttgcaaacaaataagctggttatctcttctgtgtgaccatagagatgtatttgagtctccatttctatttctgatggctgaaattttaaaattaagtatgagataaaaaccacaacaaaaagtactctagtatagtatctcaaaaataaaacaaccaaagtgactcaaatggtcttctcaaacatatcattcttcaatcctattcagagtaaaacaaagaaagaaattaaaaaatttttaattcctcataatttccagttatctggntttcatttttgtctattcttgtccaatctttgttcaaatatacatgtatttttatagttgtaatattgccacataaaaatttcctattttatattttacatatt

SEQ ID NO: 7540 - DNA, 561 bp, Homo sapiens
ccgaactttaatttcaggaattgaatgggtttgctagaatgtgatatttgaagcatcacataaaaatgatgggacaataaattttgccataaagtcaaatttagctggaaatcctggatttttttctgttaaatctggcaaccctagtctgctagccaggatccacaagtccttgttccactgtgccttggtttctcctttatttctaagtggaaaaagtattagccaccatcttacctcacagtgatgttgtgaggacatgtggaagcactttaagttttttcatcataacataaattattttcaagtgtaacttattaacctatttattatttatgtatttatttaagcatcaaatatttgtgcaagaatttggaaaaatagaagatgaatcattgattgaatagttataaagatgttatagtaaatttattttattttagatattaaatgatgttttattagataaatttcaatcagggtttttagattaaacaaacaaacaattgggtacccagttaaatttcatttcagataaacacaaataatttttagtataag

SEQ ID NO: 7541 - DNA, 411 bp, Homo sapiens
  unsure (1): n=A,T,C or G
  unsure (4): n=A,T,C or G
nggncgaggtccaaattgctcactttctaatgatagcctaatagttgtaaagttgttctggaagaaagcaggggaagagagcagactttaagactcaactcactcaatcaactaacaatggaataatacaacatggactcacgatcaaaatgatagcatttcaactactactgcattcttgtacatttagtactaggagactgtcaacagtaccaaatatttatttctgtaggttattaaaagaatcttttgtgtgtttcccacattcattcttagcttactatcaattaccaagatcttagttgttgcaattactcaggttttagggtacactccttgtttcctgtcacaaatctcattttgaaatatggcagagtaggaccacataagctattacttatatgaattcag

SEQ ID NO: 7542 - DNA, 423 bp, Homo sapiens
  unsure (1): n=A,T,C or G
  unsure (175): n=A,T,C or G
  unsure (203): n=A,T,C or G
ncgaggtctggcctaggtgaggagaggcaaggggtgcagtcgtgttagtaaagttctgggggaaaaggcgtagttgttcaagttaaggcatggaaaatcatgcgacgaaaaggattcttgaagtagaatcctattctgatcttatctagaatgggtgataaggctggaaagttanaatgacataaggtaagttgttgatccanatattagaattctgattgctaagtgactaaaagtttagggcatgggcaaaagatacataaaattatgtatctgagccctttcctatttccaaggccacccaaaagtagaagaagccacatggtaagaaaggtagtggaactctggaaagagcagagtctggtctggaagtcaggagacctccttagacctcagctctgtgattcaccagtggtggggtct

SEQ ID NO: 7543 - DNA, 306 bp, Homo sapiens
  unsure (204): n=A,T,C or G
ccaatatggggatgtggaatttttatacaagttataagtgtttggcatagtacttttggtacattgtggcttcaaaagggccagtgtaaaactgcttccatgtctaagcaaagaaaactgcctacatactggtttgtcctggcggggaataaaagggatcattggttccagtcacaggtgtagtaattgtgggtactttaaggnttggagcacttacaaggctgtggtagaatcataccccatggataccacatattaaaccatgtatatctgtggaatactcaatgtgtacacctttgactacag

SEQ ID NO: 7544 - DNA, 385 bp, Homo sapiens
gtctgtaatattcctaaaaggaatatctacatactatagcctatcaaatataatctgcattttgcaaatcaatacaaaaatctatccatcatttatacattttatatttatatactttttaaaaattagattttattgctagggtgaatttggaattcaaattaaatttggaaacttaataatgctcttctcataaccttctccccattctttttttaatttttaaacactggaagcaaatgattatcaaaatgagactgcaacttaaggcattttaaaagaaaaaataattaggtgccatatagcattttatttcaaaagtatattttgtcccacttttctcactagcaagagtaaaacacaaaccttttttcataaatatgac

SEQ ID NO: 7545 - DNA, 369 bp, Homo sapiens
ctggaaatccacagaggctggctactactgcaggtctccagcagagtcttcacggaaggagaacctctggccttgaggtgtcatgcgtggaaggataagctggtgtacaatgtgctttactatcgaaatggcaaagcctttaagtttttccactggaattctaacctcaccattctgaaaaccaacataagtcacaatggcacctaccattgctcaggcatgggaaagcatcgctacacatcagcaggaatatctgtcactgtgaaagagctatttccagctccagtgctgaatgcatctgtgacatccccactcctggaggggaatctggtcaccctgagctgtgaaacaaagttgctcttgcagagg

SEQ ID NO: 7546 - DNA, 292 bp, Homo sapiens
ctggtgaaagaatgatgctcgagttgctgcaactgaagctctgccccaggggtgcttggagatctcgaagggatgcattctgagccgagaatgtccactgtgctgcgtgggggaaggacacattgtactccacccgccatgtagctcaggtagacaaccttctgctggaggtcctgcatgaatccaaagctgaggtgtccataggggaatgagagaagcaggtggggatgggcaccctcacagcttccctggaccttggttttgttggggttcagtacagagatgccccagg

SEQ ID NO: 7547 - DNA, 442 bp, Homo sapiens; identical to SEQ ID NO: 663

SEQ ID NO: 7548 - DNA, 476 bp, Homo sapiens
ctgaccggaccggtcatgcccgtccggaacgtctataagaaggagaaagctcgagtcatcactgaggaagagaagaatttcaaagccttcgctagtctccgtatggcccgtgccaacgcccggctcttcggcatacgggcaaaaagagccaaggaagccgcagaacaggatgttgaaaagaaaaaataaagccctcctggggacttggaatcagtcggcagtcatgctgggtctccacgtggtgtgtttcgtgggaacaactgggcctgggatggggcttcactgctgtgacttcctcctgccaggggatttggggctttcttgaaagacagtccaagccctggataatgctttactttctgtgttgaagcactgttggttgtttggttagtgactgatgtaaaacggttttcttgtggggaggttacagaggctgacttcagagtggacttgtgttttttctttttaaaaagtaa

SEQ ID NO: 7549 - DNA, 567 bp, Homo sapiens
  unsure (459): n=A,T,C or G
  unsure (547): n=A,T,C or G
  unsure (567): n=A,T,C or G
ctggcattggtctagagctttataaggccattcagcgagggaccatcaagtgcaactttgcgggggttgccttgggtgattcctggatctcccctgttgattcggtgctctcctggggaccttacctgtacagcatgtctcttctcgaagacaaaggtctggcagaggtgtctaaggttgcagagcaagtactgaatgccgtaaataaggggctctacagagaggccacagagctgtgggggaaagcagaaatgatcattgaacagaacacagatggggtgaacttctataacatcttaactaaaagcactcccacgtctacaatggagtcgagtctagaattcacacagagccacctagtttgtctttgtcagcgccacgtgagacacctacaacgagatgccttaagccagctcatgaatggccccatcaagaaagaagctcaaaattattcctgangatcaatcctggggaaggccaggctaccaacgtctttgtgaacatgggaggaggacttcatgaagcccagtcattaacattgtggacnagttgctggaggcagggatn

SEQ ID NO: 7550 - DNA, 566 bp, Homo sapiens
  unsure (561): n=A,T,C or G
cctttcaaacaagttttaacattgaaaacacccatccttcaaagagcttgaagccccaagtgtccatcttccaggatgcacaagactccccaagccttcatcctcccattactatttaatatccacactacattgttcggcacttggtttccctccagtatgcaccgtggcagccagtaagacacccccagggagcacaaccgcagctcactatttttctccccatgctcaataagttcagtaagtgcttgatgattgactagcatcaggaataaactaggagcattttacattcacactatctagttaaacattccaaatgacagatttccagaaaaatgttgcaacaaatgtaagtatttatagacatgcctggtaaggtatgtagcatttggagaaataataactagaacagagtactgtacaaaagaaaatggtacacttttgtatgagtctaagatatattggacaaatgggtattcctattggtaaacatggacatcttaataaaaatacaaaattactacataaagaagcattacatccttcaactcattgggnggacc

SEQ ID NO: 7551 - DNA, 490 bp, Homo sapiens
  unsure (478): n=A,T,C or G
atttgatataaaattgaaaatgttaaaaaatcattttttttcctcagagttaaaattatttccctcatactaatgcttaatggcaatgattactccagagttttttaatttttacactggggcaatagactaggaggtctctgatttcttcttggtctaaagtgttttgattttatttctacataatagctttggtattcatgtatatacatgcatttaattgtgattttatcacctttcccatttctttccccacaagctggcatttcagtagttgcttttgaataatggttttggttacctgggaaggcaggcccagaacccatttccttgacttgcagttccgggctgtgttcacatgactgctgtctagctgatgcatttttcacatttgtcaactctggttagaaacaggtcctcaggagtattctctaacctgatattttctaaaaagatatgttgattcaactttgtttancatcctactttc

SEQ ID NO: 7552 - DNA, 558 bp, Homo sapiens
  unsure (508): n=A,T,C or G
  unsure (533): n=A,T,C or G
  unsure (543): n=A,T,C or G
cctgacagccgtttgggtcgctcgaaatcggtttgctgtcctagatcggatgcattcgcttctgatcaagaatctgaagaatgagatcaccaaaaaggtacaggtgcccaactgtgatgagatcttctatgctggcacaggcaatctcctgcttcgagatgcggactctatcacactctttgacgtacagcagaagcggactctggcatctgtgaagatttctaaagtgaaatacgttatctggtcagcagacatgtcacatgtagcactactagccaaacacgccattgtgatctgtaaccgcaaactggatgctttatgtaacattcatgagaacattcgtgtcaagagtggggcctgggatgagagtggggtatttatctataccacaagcaaccacatcaaatatgctgtcaccactggggaccacgggatcattcgaactctggatttacccatctatgtcacacgggtgaagggcaacaatgtatactgcctaaacagggantgtctccccgggtactcccattgancccctgagtnaaattcagctggccc

SEQ ID NO: 7553 - DNA, 565 bp, Homo sapiens
  unsure (52): n=A,T,C or G
  unsure (447): n=A,T,C or G
  unsure (502): n=A,T,C or G
  unsure (510): n=A,T,C or G
  unsure (521): n=A,T,C or G
  unsure (538): n=A,T,C or G
  unsure (540): n=A,T,C or G
  unsure (549): n=A,T,C or G
  unsure (563): n=A,T,C or G
cctagaatcaggcattcctccaaggaactggttcttttaagtaggttgctgncacctttttgtttttttagctctgaaacatttgtctaattttaaaaatattctcaaccatttttcattgggttttttctctctcctgaaattcttattatttgtatttaggcatgcttttctctcttctctacattatttaactttaatattttctactttttaatttccttcttgtctcctgggaagttctacaaccagctctcataattaatatgtaaattcttctgtaatttgattttaataaacctactactcttctcttttaaatattctctagcagtgtttgaaagagagttaatggcctatgctggttctccatcttgtcctgtttattatctttttcaaaagcatatatttgtaagtgtgcttcatgttttaaaatgtaaaaatacnagtcttattaaaaaaacttcagctttaattttcatttattttcattataaaaagntaaaggtnatatatgggangaaataaaatcaactananataactacntaatcacaggagtngg

SEQ ID NO: 7554 - DNA, 564 bp, Homo sapiens
  unsure (387): n=A,T,C or G
  unsure (515): n=A,T,C or G
  unsure (516): n=A,T,C or G
cctgcacgagcagacacattccgaatactaaaattccttaggaaaattagtcattgcccatgtgtgatagctgttttccattttgaattttaaccattttgggaaaaggaagagaatgggaaataccagtatagtccgaaaagcccttaaaaaatgagtgcgaaaagtggaagggtggagtggacataggaagatgatgaacttgtcattttttcctttccatagcttcattttattgtgtcaaagttgcagaaagcacttcactttcatcgaggctctttttaggcagggtacagccaagaaaacttttttatggctcagatgtaaatcctagaaaacgtagtagaaatgatggcaggatctctaactgtaaaataacagtagtgntagtagtaagtgtcattataataacgttatagaactctgcacatcaaaaataccacattttatcatgatctctgcaagagatttctgttggtagtcattctaacttctaataaataataccttgagtnnggaaaggttctgtgaggatccaataataatgaaaatgacagtggtgat

SEQ ID NO: 7555 - DNA, 564 bp, Homo sapiens
  unsure (564): n=A,T,C or G
ctgtagatcatttgcattcattggcatgtaatcataaagggccacaacctttttcagctcacttgtggagactggtgctgctgctggctcaggcggtagtggctttttcaagatctggtcctcctcaggcgttgggggaagaggcttttttgtcttccggtgagaactcccaggttttaagcttccattcctgttctccaaaatttggcagcccatagcatttttggctgtctgagagcagcagagatactgcccatcgatccagaagcaagggtgatatttctgaaccagatcactgttgtaccggattacgtttttgagctggtgaatccaccgcttccttagttcttcagttggggagaagacgtagagaggcccttcatcatatacaacctggaagggataagggaacctttcaatgattgaaatttgctccatttcactggactcttcacctcttctcggaatctgtctttctggaggaggatttttttcaggaaccactgtttcaacacaagtgatcttctcaacatctattgaacccttcttactgctcttcttccn

SEQ ID NO: 7556 - DNA, 457 bp, Homo sapiens
  unsure (418): n=A,T,C or G
ccaccttatatataattatatattctaccataaatgctggccttcttcaaattatgattttggaaaatctaacccatacagagggataaaaaattgacatcccttggacaacttctccttgtttttttttgttttgttttgtttttaacattccaagctctctctggtcccctatccaaggagaaatgctagggcctcgaggatgtccgctatatatttttataactaaatgataaatttatattcaaattgtttgaatacgtttccaaaactttcagagtacaagtcattgttaagtttgcctttactttaaaaactaaaagaatacatttctatataaactagcagtcaggaatttgcctgttttctagcttcttcatctatctaaaatatatatttagctaccagaattatgggnctcctaataaaatcttaataaaatagcatataaaatcaa

SEQ ID NO: 7557 - DNA, 509 bp, Homo sapiens
  unsure (469): n=A,T,C or G
  unsure (509): n=A,T,C or G
gttgcttcctggtatctgatttagaaataacatttaaatgccaagtatctgggggattgaaggaagggtctatatgagcaggtgaattagcagtactgtttttgtttagtggatattgttagtgactttttgtgtgtgttttgctttgggacctttttattttggtgttgcaaaaagtaacatattttcatcattgcttcatacgacatggagttaggacagggaaaaatcattcaacactccttatgcattaaatgatcaaataaaccagtgtaggatattaagactatcaattggtgggattaggcttgacattttatttttataaatatatattttttctgaatgtgtctgagtccaagagtgggcaaaaaataattttctactttggactaatctatagaggtttttgaaagtctgcattactaacttgttgaattcatgatattctgcctatggccaaattgtnaacctttgtttttctaaaataaagtaattgaaaacctgcn

SEQ ID NO: 7558 - DNA, 536 bp, Homo sapiens
  unsure (487): n=A,T,C or G
ctggggtgggcttctcctactccgatgacaagttttatgcaactaatgacactgaggtcgcccagagcaattttgaggcccttcaagatttcttccgcctctttccggagtacaagaacaacaaacttttcctgaccggggagagctatgctggcatctacatccccaccctggccgtgctggtcatgcaggatcccagcatgaaccttcagggactggctgtgggcaatggactctcctcctatgagcagaatgacaactccctggtctactttgcctactaccatggccttctggggaacaggctttggtcttctctccagacccactgctgctctcaaaacaagtgtaacttctatgacaacaaagacctggaatgcgtgaccaatcttcaggaagtggcccgcatcgtgggcaactctggcctcaacatctacaatctctatgccccgtgtgctggaggggtgcccaccattttaggtatganaaggacactgttgtggtccaggatttggcaacatcttcctcgcctgcca

SEQ ID NO: 7559 - DNA, 329 bp, Homo sapiens
ctggaaatgaacctaaggaattttgctgaaattatcgaagctgatgaagtacttctttttgagagagctacttttctgaccaagtttagatgtgactgaacattttcactgagcggggtgaagtcaagcaagggggatttgttcttccactggtatagaaattatgttttgaaattttcacattgtctcatggaatttccctgagttttcttctggtgagtgactcagttttgcttcctactagacactctgcatctgtatattcagcctataggtaatacttgtgtggttttattaaaatctgaaaaagttagaaaaagtattttcag

SEQ ID NO: 7560 - DNA, 519 bp, Homo sapiens
  unsure (416): n=A,T,C or G
  unsure (474): n=A,T,C or G
tcttaaagtaggttgaggcttgaggctgggctttcgggtttttttgttttttgttttgttttgttttgttttgttttcttgtacttaaacctgcttgcttcctaccacagattctttattttcccaaacactacaaaaaaacttttaaaactttgccatttcatctgtttacactctttgccactgattagcagtatttaaatcttgcaagaatattttgtgctttctttagaaacacaagagtatagatttttctcactgaaaagtgagagttacgcattgcagccatgaagggatgctaggatcaattatggcagtaccttttttcccctcctgttcttgaccagttgtctcttttgttttgggtcccacttaggattaatggatgtaaggtattttcctgtgcctttattttntgtcttctattggaaggaggtgtaacggcagaatagcacccgtgttgggggttttccnttcaacactgcaagtgaatattgccaccatgtgaaccctcaaaat

SEQ ID NO: 7561 - DNA, 455 bp, Homo sapiens
tcgactcgcttaggcccttgtttattccctatctagtgcaaagccacgaattggcagcatgttttctgacctttggtttggttggtttaaaatggtgttctagattttaaaatcgtttaagtgaccagttagatactcattcagagcagactcgggcggatagatagggaatactgtatgggtatatctttgtgtctagactttttgagatcgccctgaaggactgtttttgttttgttttgtttgcttggcatagccccttcaaggaatttaatctctcggccatattcttgtctgattttacggaggttgatgtcgctactgtgttaaataaccagtactttggttttcattccgttactaagtactttaaggtcttatatgtcataattttattgctaacatcaaatatttattttattttttaaaaaaataactaaacatggggcaaagga

SEQ ID NO: 7562 - DNA, 446 bp, Homo sapiens
  unsure (13): n=A,T,C or G
  unsure (16): n=A,T,C or G
  unsure (259): n=A,T,C or G
  unsure (433): n=A,T,C or G
  unsure (439): n=A,T,C or G
  unsure (440): n=A,T,C or G
gttgaaatcatanaanatgcaaatgacctttcaaaatcaacacaatgtgttctgaaactttcgtgactaataccatgcatctgtgatcaatgaactatgtggttttgaatcggatgtagaccattagtactactacttgagctaaacttctgcatggttcataatttttaaagtgtgtagttaatatgcatgttatcgtcctttcttccattcttaccagtatgtgcccatttgcaaaacaaaaatgctaataatcagnaatagtcctataaaagatgttaactctgtttagtcattgactgattttgctctaaccttaaaattttgtgattattgacctctgttgcatttattctaaagccccccaaaaattatctagccgtttcgaatatcaacattaccctggtgtattcactgctgtatgcattattgntctttnntgctgt

SEQ ID NO: 7563 - DNA, 336 bp, Homo sapiens
ccaccaacaccccccacagcaccctgagcgtcaactggagcctcctgctatcccctgagcccgatgggggcctgatggtgctccctaaggacagcattcagttttcttctgcccttgtttttaccaggctgcttgagtttgacagcaccaacgtgtccgatacggcagcaaagcctttgggaagaccatatcctccatactccttggccgatttctcttggaacaacatcactgattcattggatcctgccaccctgagtgccacatttcaaggccaccccatgaacgaccctaccaggacttttgccaatggcagcctggccttcagggtccagg

SEQ ID NO: 7564 - DNA, 428 bp, Homo sapiens
  unsure (132): n=A,T,C or G
  unsure (155): n=A,T,C or G
  unsure (197): n=A,T,C or G
  unsure (233): n=A,T,C or G
  unsure (248): n=A,T,C or G
  unsure (272): n=A,T,C or G
  unsure (291): n=A,T,C or G
  unsure (320): n=A,T,C or G
  unsure (423): n=A,T,C or G
cgaggtccaatctaatttcttaagatggataataggtcactatttttgagtccttttttttcccctaaatatttatttaaggctataaaatcactacatctctcaagttttaatttggcatattcttattgnttcattcaaatatgctttaattnctcttgcgatttattttttaacccttgaattatttagaaggncactgtttaattttcaaacactgatttttttatggnttttaaaaattaggnttccattattgcattgggatcagnagaaaatatcctaaatggntttaatcctacaatgtcatctggcttcgngaccagtttgttgtcatttagtttaaatgttctgtgtgcacatgagcattttgtttaatgcattctgtacagggccttggatttgaatgattatgtaaatganggttt

SEQ ID NO: 7565 - DNA, 406 bp, Homo sapiens
cctttctggggcaaagtatcaacgcaagaagcaagaactcctaaggaaggcatctgtaagtctgtctggagcttaattcccagatggtctgacacagggcgtggccacagcgccagcctcagactggagggcaaggggttcccttgagggctgcagttctactcaggctggtggagaactctggcttttggaagcgagagtaaaaagctaatgacgaggaaccgaaaaatcgcgagtgtttcgcgggtaactggggttgagggccaaaatatttggaatgaaggactttggccctatttaaggcagattttacagagcgcacctcaaacgtacaagtcagtaggactccttatttggcgtgacccgacctggccgcggagcctgcatttcctcgcagcctctcagt

SEQ ID NO: 7566 - DNA, 555 bp, Homo sapiens
ggcaagtcaggcgtcctgtttctcggatggatacccattaccatcttggacctggaagaagtgttcagacaagtctcccaactgcacagaagagatcacagaaggagtctggaatagaaaggctaacagaaaagtgtttggacagtgggtgtcgagcagtactctaaacatgagtgaagccataaaagggttcctggtcaagtgctgtgcatacaattcccttggcacatcttgtgagacgatccttttaaactctccaggccccttccctttcatccaagacaacatctcattctatgcaacaattggtgtttgtctcctcttcattgtcgttttaaccctgctaatttgtcacaagtacaaaaaggtaaaagcaaaggtaaaaattcattattctttcctctatctgcagaaactgcctattcctaactgactcatcatttcatctctgaagcaatttaggtatgaaagccagctacagatggtacaggtgacccggctcctcaaataatgagtaccttctaccgttgatttcagagaatatgaatatgatct

SEQ ID NO: 7567 - DNA, 392 bp, Homo sapiens
ctggcagatgcagaagaagcgatgtatcagaatgtggatggccgtgtttcggaatgtcctcacacctaccaaaacaggcgacctttcagcagagagatggatttggggctactctctccgcaggctcaggtcgaagattcgtagaggaacaatttagttttaaggacttcatccctccacctatccctaacaggctgtagattaccaaaacaagattaatttcatcactaaaagaaaatctattatcaactgctgcttcaccagacttttctctagaagctgtctgcgtttactcttgttttcaaagggacttttgtaaaatcaaatcatcctgtcacaaggcaggaggagctgataatgaactttattggagcattgatctgcatccaagg

SEQ ID NO: 7568 - DNA, 564 bp, Homo sapiens
  unsure (1): n=A,T,C or G
  unsure (462): n=A,T,C or G
ncgaggtttttgagggtaggtaaaatagctatattacttaaaagtcaaactttataaaaaggtaaagcggagatgtctgtctcccaatcccatctattcctccttcaccctgttccccatctatgagaaattatatttattagtgtcatggttattttttcagtgtttctatatgtaatactcattatatgttatacaaacacaaatatacatatacataatttccttccatttttatcaatttccttcctttctcactgtcctgctcctagctttaattttaccaattaataaaacatactaaagatttttttcatatcagtgcatgaagcttttcctcttttttctttcaactgcataatattccactatgtggaaatatcatggtttatttaaataaattcttatcagggaatatttgagttgttccagggttttctttctttctttcttttttgctgngaaaaacaatgttacagtgaataactaacatcatttctcatttcatatgtggacaaagtatctgtgggatagagttccagaactgaaattgctgcttgaagg

SEQ ID NO: 7569 - DNA, 534 bp, Homo sapiens
  unsure (493): n=A,T,C or G
ctgtatgagtttgatatcaaagttccactgttggttcgaggacctgggatcaaaccaaatcagacaagcaagatgctggttgccaacattgacttgggtcctactattttggacattgctggctacgacctaaataagacacagatggatgggatgtccttattgcccattttgagaggtgccagtaacttgacctggcgatcagatgtcctggtggaataccaaggagaaggccgtaacgtcactgacccaacatgcccttccctgagtcctggcgtatctcaatgcttcccagactgtgtatgtgaagatgcttataacaatacctatgcctgtgtgaggacaatgtcagcattgtggaatttgcagtattgcgagtttgatgaccaggaggtgtttgtagaagtctataatctgactgcagacccagaccagatcactaacattgctaaaaccatagacccagagcttttaggaaagatgaactatcggntaatgatgtacagtcctgttctgggccaacctgtcgcactt

SEQ ID NO: 7570 - DNA, 463 bp, Homo sapiens
  unsure (1): n=A,T,C or G
  unsure (4): n=A,T,C or G
nggncgaggtctggcttcactgctcaggtgattatcctgaaccatccaggccaaataagcgccggctatgcccctgtattggattgccacacggctcacattgcatgcaagtttgctgagctgaaggaaaagattgatcgccgttctggtaaaaagctggaagatggccctaaattcttgaagtctggtgatgctgccattgttgatatggttcctggcaagcccatgtgtgttgagagcttctcagactatccacctttgggtcgctttgctgttcgtgatatgagacagacagttgcggtgggtgtcatcaaagcagtggacaagaaggctgctggagctggcaaggtcaccaagtctgcccagaaagctcagaaggctaaatgaatattatccctaatacctgccaccccactcttaatcagtggtggaagaacggtctcaaaactgtttgttcaattgg

SEQ ID NO: 7571 - DNA, 187 bp, Homo sapiens
ctgtccaactgcagcggctacgtgtttccatggagacaaacttggtgtctcaagttcagggcttcgaaagtcccgaatatttgtttgtcccgagagaagagttttgactttgaagaggtccaggtgggactcgctgggggtggggtgctccgggattagttcagagggaggtgttctggaagactcc

SEQ ID NO: 7572 - DNA, 281 bp, Homo sapiens
  unsure (274): n=A,T,C or G
  unsure (276): n=A,T,C or G
ccattgatcttgaatttgccctctcctagtgctgcagtcccacttcaaagccattttctgaggaggatggtttaggtctggcaattgtccttgaaaaatcccacccatgttgtaccaccttggtgagtcatatgccactcatcagcttgggaatgatggctgccaactcccaatctcccaggaaggcagggggcagaatctttttttcacttggcctgctacctccattaaaaaaccattctcttacagtttaaaaaaaaaaaaaaaaaaaaangntttcc

SEQ ID NO: 7573 - DNA, 336 bp, Homo sapiens
ccacttcaccagaacctctgtgtcagaaaaatttctcttccttttaaaatgatgagggggaactttcagacagtgtctgattagggtgggtggagagaggggcttcctagaaagtcaggcagggcagggctgaagccctctgggttaactgagtgcttttgatatgaaggcaggtaagactggacaggtgggggtgttagtgaggggatggtgtagggtgtgctgaagaactccacttgagctctgcacaccagggaaaatgaccataaaacatcccatcttcactgctcagagaaggctagatctgctgtgagctagaaagccatgtgggggcag

SEQ ID NO: 7574 - DNA, 495 bp, Homo sapiens
ctgtgaagcatacataaataaatgaagtaagccatactgatttaatttattggatgttattttccctaagacctgaaaatgaacatagtatgctagttatttttcagtgttagccttttactttcctcacacaatttggaatcatataatataggtactttgtccctgattaaataatgtgacggatagaatgcatcaagtgtttattatgaaaagagtggaaaagtatatagcttttagcaaaaggtgtttgcccattctaagaaatgagcgaatatatagaaatagtgtgggcatttcttcctgttaggtggagtgtatgtgttgacatttctccccatctcttcccactctgttttctccccattatttgaataaagtgactgctgaagatgactttgaatccttatccacttaatttaatgtttaaagaaaaacctgtaatggaaagtgagactctttccctaatttcagtttagagcaacttgaagaaga

SEQ ID NO: 7575 - DNA, 526 bp, Homo sapiens
ccaactaggtagacaaagccttatgtttttccattgttctgtatgaaccaggaggatcacggctcgtattggttcctgctatgcacagcttgattaatgggtaaggtgtactccatatctacaaaccttcaggtagtttacagacattcttggtgcacccctaactatgccagatcattggctgggcactaaagatacaggtggagtaaaaaattaattgtcaaaataactggctaatttaaaatttacaattgcctagaagaccatctttgatgttaagaaggaacaattaagtaaatactaggatggcaaacaggttccataatttcattttgttgagacaacagttttgctcatgtcaccaggctgaagtgcaatgttgtgatctctgctcactgcaacctccacctcccaggttcaagcaattcttgcctcagcctcctgagtagctgggattataggcatgcaccaccatgcccaggtaatcttggtatttttagtacagatggggtttcactgtgttggg

SEQ ID NO: 7576 - DNA, 337 bp, Homo sapiens
ctgcagaggccacctggattgcgcctaatgtgtttgagcatcacttaggagaagtcttctatttatttatttatttatttatttatttgtttgttttagaagattctatgttaatattttatgtgtaaaataaggttatgattgaatctacttgcacactctcccattatatttattgtttattttaggtcaaacccaagttagttcaatcctgattcatatttaatttgaagatagaaggtttgcagatattctctagtcatttgttaatatttcttcgtgatgacatatcacatgtcagccactgtgatagaggctgaggaatccaagaaaatgg

SEQ ID NO: 7577 - DNA, 509 bp, Homo sapiens
  unsure (475): n=A,T,C or G
  unsure (509): n=A,T,C or G
ccaccctcagggttcaaagagactggcccaggggtacacaattgctggaatattctctgcgagtcatgcacacgtgcgggggtgaggtgcagttatatggtgacacacacagtgttactgtgagctctcagggtgcacagagggcaggtgacaagggcatcagctaatctgtcccacctggtccagcccatccagttcaggggcatcaagggggctgaggccccggtagccactgtagaccctgtgactatcactgacaccgtcactgggctccattgggcaaatgtagtccgtcgattcatcgaacttcttttttcttatgtttccgaagtgtgaaaatcctagtttccttggccggactttggctgtggtggtcagtgggtgtgtaagctggtgaggccattttctctcgcttttcctgttcagcctccggaccaatcaaggcattgaacttggtggtcaggtggcgcctgangagcgtcttttgtggggggatgttgagaacatan

SEQ ID NO: 7578 - DNA, 446 bp, Homo sapiens
ccacagctaacatcattgcagcacctttactccttcggctttttgccagcaccaacattggcctttgcagtccccctgactttcttcattctgttcttgcgttcctttcgttgctttcttgaggtctttttcttctcatacaggccatgtcttgcaagtctatgtttgggttcatttttctttgcataatccagggaatcataaatcatgccaaagccagttgtcttgccaccaccaaaatgagttctgaatccaaatacaaagatgacatccggtgtggtcttgtacattttggctagtttttcccgaatttctgtcttaggcactgtcgccttcccggggtgaaggacatcaatgaccatttgtttcctctgaagtagtcggttggtcatgaactttctagtgcggatagttacggtgtcgttcatgatggcgatctatcttca

SEQ ID NO: 7579 - DNA, 507 bp, Homo sapiens
  unsure (1): n=A,T,C or G
  unsure (79): n=A,T,C or G
  unsure (94): n=A,T,C or G
  unsure (105): n=A,T,C or G
  unsure (138): n=A,T,C or G
  unsure (145): n=A,T,C or G
  unsure (169): n=A,T,C or G
  unsure (399): n=A,T,C or G
ncgaggtaaaaagagtgttgcctccaaaaccgaagttaaaaaaacccgacgaccaagatctgtgctgaatactcagccntaacagaccaatgcnggggaggtggnctcctcactctcaagtactgaaattcggagacntagccanaggcggcacacaagtgcggaagangaatagccacccgcctgttaaaatagcctggaaaactgcggcagcaaggaaatccttaccagcttccattacgatgcacaaagggagcctggatttgcagaagtgtaacatgtctccagttgtgaaaattgaacaagtgtttgctcttcagaatgctacagggggatgggaaatttatcgatcaatttgtttattcaacaaagggaattggtaacaaaacagaaataaantgtcaggggggcaagacaggcttataatttctacaccaaaccagagaaatgaaaagccaacgcagagtgtatcatctcctgaagccaccttctggttctacagggctc

SEQ ID NO: 7580 - DNA, 561 bp, Homo sapiens
  unsure (490): n=A,T,C or G
  unsure (536): n=A,T,C or G
ccaccatgcacatttccaacacatgcacactcacagccctgaaaacagtgttaggtttcagttaatacatttattacagcaggtctttagtcattattgccattaaaaagttttcatgaaatttcacaaaatcttttaggctattagtattagctttctttttatggagtgacactttgttaatttatgaaatatttacagcatttacaaaaagtaagagaatgtctaataaaatttcttatacttacaaaattcatacattatactactgtatttgagatgtcttacttggtagaccaattaaactatgacataaaataatttacaaagatatatttaatctttcttaattcattgaaaacaaaaccatattagttataaatagtcctttacaaatcattgtaaaacacttcattgttttaactcgagccttagcttttacaaatatacttaataaatgaattagttcagatagcaaatagaactgtgnatttaaaatttcacttaatactataaaaacaaaacacctgaaaaancaaacggcctggtacttcaagtaaa

SEQ ID NO: 7581 - DNA, 473 bp, Homo sapiens
ctgctcatcgtgggcgtctcggctgccatctacagcaagggctacggccgccccagatactgctggttggactttgagcagggcttcctctggagcttcttgggacctgtgaccttcatcattttgtgcaatgctgtcattttcgtgactaccgtctggaagctcactcagaagttttctgaaatcaatccagacatgaagaaattaaagaaggcgagggcgctgaccatcacggccatcgcgcagctcttcctgttgggctgcacctgggtctttggcctgttcatcttcgacgatcggagcttggtgctgacctatgtgtttaccatcctcaactgcctgcagggcgccttcctctacctgctgcactgcctgctcaacaagaaggttcgggaagaataccggaagtgggcctgcctagttgctggggggagcaagtactcagaattcacctccaccacgtctggcactgg

SEQ ID NO: 7582 - DNA, 573 bp, Homo sapiens
  unsure (392): n=A,T,C or G
  unsure (538): n=A,T,C or G
ctgaaaaatcctcagtgcaagaaggcaatagaggtgatagattcagagtatatttaggaggtagaccagcctagcagatattgttaggaccccacatatgtccctcactgttcccatgccctttacagcttgcccctgcaagtatctctgagtctttacctgaagacactaaggtttggtttgtacaaagggtaagccaagaattaccagggagttagcatccctggcagtggtcctcaaccagtgtcagatggaagtcagtggataaataccccaggtttgcttgcccttcaaatgggacagttctgaggaatgctttaggcagaggactcagatggcagagtgccaaccgcccacagtggaaacctgctcattaacataccccatactanctctcttcccttcctggtttcatttccccattctcatatcggtatttcctggaatcatctcccatataaactgcttgcattcagatctttgtctcaaagtccactttgtgggaacccaacttgagacaaacagaaaaaacttttanacaagtagatgatgaaaaatgaagactcaaatatg

SEQ ID NO: 7583 - DNA, 320 bp, Homo sapiens
ctggctgtgcaagaccctggcagggccctcgcctcctgagaaaccgagagtcagaaccaaagccaggctgtcctggttggagactgagccagaaagggtggctcacctcacggtgaggctgtcgagtgacctgagaacctcagaccctcacgtcagccggatgtcgcaccagcctgctgttgccaccaaaatgccagaagagatggacaagccactgatcagcctccacctggtggacagcgatagtagccttgccaaggtccccgatgaggcccccaaagtgggcatcctgggtagcggggactttgcccgctccctgg

SEQ ID NO: 7584 - DNA, 252 bp, Homo sapiens
cctgactgaagtgcttcccacactccccacatgtatagggtttttctcctgtgtgcaccctctgatgcatgtcgaggttcaagctccacttgaagccctttccacactccccacatttgtatggcttttctccagtgtggactttttgatgggcttgaaggtgtgcactccgactgaagctcttcccacactcttcacatttaaatggtttttccccactgtgaactctctgatgggttagaagatgcgagg

SEQ ID NO: 7585 - DNA, 526 bp, Homo sapiens
catttcaaaaccataagctctagccagaaaatcagtagatgaggttgttgtttcgttaatttctgctgttgaagaattcttgttagagtcttgttcagttatggtttgtggtctactagtctggatttcttctgcccacctgacagtctgattttgaggatgtcccgatgtccgtggagaaagggagaggtgccaccgtgggtccttctgctccagtgtcacttaaaatttctattaatgttgtgctggttactgacccactaccttcaaagatgtctgtttgagatacgagtggtccaacttcttttgccacattttccattctgttatagtcttcaattttgtcacttgaggtactttccacttgagaagtgtggggatataatgtgttattgatttgttccacttcagtaaaattcactgactctgttggtagagtaggtaaaacttcttctcctgatcccagtccagagaataagactcagtatctgactcttgaattgttggcctcatgcctttcggaaaa

SEQ ID NO: 7586 - DNA, 391 bp, Homo sapiens
  unsure (382): n=A,T,C or G
ctgccgctgctcgttgttttttctgcaatgatatttgggactattacaaatcaagatctgcctgtgatcaagtgtgttttaatcaatcataagaacaatgattcatcagtggggaagtcatcatcatatcccatggtatcagaatccccggaagacctcgggtgtgcgttgagaccccagagctcagggacagtgtacgaagctgccgctgtggaagtggatgtatctgcttccatcacactgcaagtgctggtcgatgccccagggaacatttcctgtctctgggtctttaagcacagctccctgaattgccagccacattttgatttacaaaacagaggagttgtttccatggtcattttgaaaatgacagaaacccaanctggagaat

SEQ ID NO: 7587 - DNA, 452 bp, Homo sapiens
cggcaggaagcaggacatcggcgacatcctccaccagatcatgaccatcaccgaccagagcttggacgaggcgcaagcaaagaaacatgccctgaactgtcacagaatgaaaccagcgctcttcagcgtcctgtgtgagatcaaagagaaaacaggcatgtaatgaatttactacacatgtgatgaaccttctccgagaacagagtagaacacgtcccatttctccaaaagagattgaaagaatggtgggcatcatccatcgaaaatttagttccattcagatgcagctcaaacaaagcacttgtgaagcagttatgattttaagatcaaggttccttgatgccagacggaaaaggcgtaacttcagtaaacaggccacagaaatcttgaatgaatatttttactccacctcagcaacccctaccccagtgaagaagccaaagaggagctgg

SEQ ID NO: 7588 - DNA, 542 bp, Homo sapiens
  unsure (4): n=A,T,C or G
gggncgaggtccacaccataagtcaggggcaaactggaactgtgggaaggagctgcagcctgtacttccccttcagttagagcctgaagctggaggagcttctttagcaagtacctgagatcaggaaggaaaggagcagagaaatgaacttccgtattgtctcaattcagtattttactcaagtactgggaaaagccagaattatatacaaagattactatactcataaaagaaaggttcttattaggccctatgaatcataaagccctggaggataatcaatacttcaagaggccaaggataagaactgtagcttatctcttgcatctggacggttcctctaccttgatgttggacggtgttaggcttctgaaaggcacattatttacacatgtatatatacccattgtgctttgcacagaatagtacgtacagaataaatatttgtagaacgagaggcagttgcttttatcacttggcttttataattgggccataagattaaataatcttagtaagattatttattagatgtggcaaga

SEQ ID NO: 7589 - DNA, 545 bp, Homo sapiens
  unsure (1): n=A,T,C or G
ncgaggtggccctttaaatttgtaaattaaactttaatttcttcctaagttataatattgatgtaatcacagaccggacacactagttttagcattctaatccatctgttaaaattatgttgtttgtgcatcacctgaaattgccatgggtactgctggtagtgtgcttacccctcactgagaaatacttacctctgctttttgctatgtggagttgaatagtgctgaaggctgcattaactcgttcagatggcagttcttcccatataatgtataacatctttgttactctacttagcaccttagtgaatacagagatggctgtacagcctccagaaatgctaagttggttggttgtatatggaaatctctgttaatatttgggacaaaccctgggaataattgtgtgagcaaacttatttactaaagaactgcattgctaattatggacttgttgacaccagtggagcccaggggaagaagttgtggttttgggcaaggggttctttcttatcaacttcaaacttacagggtgaagttagcca

SEQ ID NO: 7590 - DNA, 287 bp, Homo sapiens
ctgttcttggaggtcctgcccctgggacttgtccggctcatccggagtgaggagggcctggagatgctcattcaatgagcgggaggcatctctcccttcccgtaacttctcctttaactgcgtcagctctcgttcctgagagtgaaccaggactttatattgcctgagctcctcagcttgcttgagctgctctgcaagcttctcctccttgaactgtcgctcattcctcagcataaattttatgaggtctttacactcttcatacttgtatttcttctgtcggttgg

SEQ ID NO: 7591 - DNA, 579 bp, Homo sapiens
  unsure (1): n=A,T,C or G
  unsure (4): n=A,T,C or G
  unsure (550): n=A,T,C or G
nggncgaggtgtctccagggccagtgtctgctgcgatcgagtcccaccttccaagtcctggcatctcaatgcatctgggaagctacctgcattaagtcaggactgaggtgaactccagaaagaagaagctatggccgcagtgattctggagagcatctttctgaagcgatcccaacagaaaaagaaaacatcacctctaaacttcaagaagcgcctgtttctcttgaccgtgcacaaactctcctactatgagtatgactttgaacgtgggagaagaggcagtaagaagggttcaatagatgttgagaagatcacttgtgttgaaacagtggttcctgaaaaaaatcctcctccagaaagacagattccgagaagaggtgaagagtccagtgaaatggagcaaatttcaatcattgaaaggttcccttatcccttccaggttgtatatgatgaagggcctctctacgtcttcttcccactgaagaactaaggaagcggtggattccccagctcaaaaacgtaatccggtacaacagtggatctggttcanaaatatcacccttgcttctggatcgatgg

SEQ ID NO: 7592 - DNA, 393 bp, Homo sapiens
ctgtgaagcatacataaataaatgaagtaagccatactgatttaatttattggatgttattttccctaagacctgaaaatgaacatagtatgctagttatttttcagtgttagccttttactttcctcacacaatttggaatcatataatataggtactttgtccctgattaaataatgtgacggatagaatgcatcaagtgtttattatgaaaagagtggaaaagtatatagcttttagcaaaaggtgtttgcccattctaagaaatgagcgaatatatagaaatagtgtgggcatttcttcctgttaggtggagtgtatgtgttgacatttctccccatctcttcccactctgttttctccccattatttgaataaaagtgactgctgaaa

SEQ ID NO: 7593 - DNA, 439 bp, Homo sapiens
gcaccggcatcggctgacactgctgcctccagctagttatttcgtcctcttccgttcttcacccctacaccttggaggtgaacttctcacctgagggctgtaaagactcgtttgaaaatggagagccaagaaccaacggaatcttctcagaatggcaaacagtatatcatttcagaggagttaatttcagaaggaaaatgggtcaagcttgaaaaaacaacgtacatggatcctactggtaaaactagaacttgggaatcagtgaaacgtacaaccaggaaagagcagactgcggatggtgtcgcggtcatccccgtgctgcagagaacacttcactatgagtgtatcgttctggtgaaacagttccgaccaccaatggggggctactgcatagagttccctgcaggtctcatagatgatggtgaaaccccagaagcag

SEQ ID NO: 7594 - DNA, 473 bp, Homo sapiens
cgaggtcctggacctgtgtaaaccttcaaacactcttttttacattaggtcatgaagttaaattttttactgtttctgtgctacagactcttcaaaggaaaatagttaagtcaatttcaaagaaaatgaccagcacatttttaaaacattagaaatgatttgactttgactatctactgccaaaaaaaggttaaggaatttgtaatgagaagctaaaaactttaaggaattttaaggaactcaaaacaaaaactcattaaatgtaattaaagtgaattctacaaataaagcctcttaatacatttctataatagtcacttaagacttaaattcaaacactagcaaaccacaaaatcagactgtatgactgacatccaaaagataaatataaatcaaaatccgaccccagcattagccaagggggtaggtgttcctcttgaggaaggcaggaattcctcttctgcccctgttgg

SEQ ID NO: 7595 - DNA, 336 bp, Homo sapiens
gcgtgccctctggagaaggccctggatgtgatggtgtccaccttccacaagtactcgggcaaagagggtgacaagttcaagctcaacaagtcagaactaaaggagctgctgacccgggagctgcccagcttcttggggaaaaggacagatgaagctgctttccagaagctgatgagcaacttggacagcaacagggacaacgaggtggacttccaagagtactgtgtcttcctgtcctgcatcgccatgatgtgtaacgaattctttgaaggcttcccagataagcagcccaggaagaaatgaaaactcctctgatgtggttggggggtctgccag

SEQ ID NO: 7596 - DNA, 366 bp, Homo sapiens
ccattttaccagataattatttcagtgaatttgaatttagtgtatttgtcacttaaggaagcttataggcttgggccatatacttcttttttggatatgttaaagaaaaaaaatgttttaggcttgttgtacccctgaagttggagcattgagaactttgtttatatttgtatattaaaattgttcccacccccaaattattaaattggtgattaccttttttccctctccaggaagtatttatccatgtagataatacgttttgaagggctttggatatcaggggctgtgtatgaatccctatcttgtcaaagaaattatttttttaaaactttattttgaatttttataattctagttattcag

SEQ ID NO: 7597 - DNA, 519 bp, Homo sapiens
  unsure (1): n=A,T,C or G
  unsure (4): n=A,T,C or G
  unsure (439): n=A,T,C or G
  unsure (499): n=A,T,C or G
nggncgaggtccaagaacctcttccaccgggccatttctgagagtggcgtggccctcacttctgttctggtgaagaaaggtgatgtcaagcccttggctgagcaaattgctatcactgctgggtgcaaaaccaccacctctgctgtcatggttcacttgcctgcgacagaagacggaagaggagctcttggagacgacattgaaaatgaaattcttatctctggacttacagggagaccccagagagagtcaaccccttctgggcactgtgattgatgggatgcttgctgctgaaaacacctgaagagcttcaagctgaaaggaatttccacactgtcccctacatggtcggaattaacaagcaggagtttggctggttgattccaatgcagttgatgagctatccactctccgaagggcaactgggaccagaagacanccatgtcactccttgtggaagtcctatccccttgtttgcatttgctaaggaacttgattncagaagcccctgagaaaata

SEQ ID NO: 7598 - DNA, 449 bp, Homo sapiens
  unsure (12): n=A,T,C or G
ctggagagtgtngatcccaaaaattacccaaagaagaagatggaaaagcgatttgtcttcaacaagatagaaatcaataacaagctggaatttgagtctgcccagttccccaactggtacatcagcacctctcaagcagaaaacatgcccgtcttcctgggagggaccaaaggcggccaggatataactgacttcaccatgcaatttgtgtcttcctaaagagagctgtacccagagagtcctgtgctgaatgtggactcaatccctagggctggcagaaagggaacagaaaggtttttgagtacggctatagcctggactttcctgttgtctacaccaatgcccaactgcctgccttagggtagtgctaagaggatctcctgtccatcagccaggacagtcagctctctcctttcagggccaatccccagcccttttgttgagccagg

SEQ ID NO: 7599 - DNA, 359 bp, Homo sapiens
ccaaagaatttgttacatcagcaccaaaaccatctgacttgtattatgaaccttctggagaaggatctggagaagtggatattgttgattcatttcacacttctgcaactactcaggcaaccagacaagaaagcagcaccacatttgtttctgatgggtccctggaaaaacatcctgaggtgccaagcgctaaagctgttactgctgatggattcccaacagtttcagtgatgctgcctcttcattcagagcagaacaaaagctcccctgatccaactagcacactgtcaaatacagtgtcatatgagaggtccacagacggtagtttccaagaccgtttcagggaattcgaggattcc

SEQ ID NO: 7600 - DNA, 250 bp, Homo sapiens
  unsure (10): n=A,T,C or G
  unsure (89): n=A,T,C or G
  unsure (100): n=A,T,C or G
  unsure (145): n=A,T,C or G
  unsure (179): n=A,T,C or G
  unsure (219): n=A,T,C or G
  unsure (237): n=A,T,C or G
  unsure (244): n=A,T,C or G
ccaagacggnctcaatctcctgacctcgtgatctgcctgcctcggcctcccaaagtgctgggattacaggtgtgagccactgcacacanccaaacattanactttcaaaccaaatttagatatagtgtttataagaactcgtggngtatctcttcaaaacctggcatcttgaaaccaanatctggtaaacagaaacatcagtatgggggcctttgatangggaatactgaattgcangcctacncagcga

SEQ ID NO: 7601 - DNA, 380 bp, Homo sapiens
ccaaagcacacatatcggcttttctcactatatatctaaaattgctattgaggaaagtaggccaaatttcaatgagagctatttgaagaagggagagagaaattactttcacctgactgaaagaagtggtagaggtgtacatagctttttattcttaattatctagtctggcaaaagacagtaatctcaaatacaacaatacactctaagaaaaggttcccctcccggctctcacaacgtctcccttcctaataaattttaaaagcataagggtcacagggccagttacatagtatgtattcaataagatttgttaaatgaatggcacttcaagttcttattaagaagctaggtctcttttttccccctatccttcccaa

SEQ ID NO: 7602 - DNA, 297 bp, Homo sapiens
cctttgtatcagggcaggtctcctgcagagtcttctctttgtcatgggagaagcttcattgtgcgttgaggctacttctgtgttattgaggagtctgggcttttttctgataccacgtttcttttctttcctgggccattgtagcaagacactaagggcgactaccagaaagcgctgctgtacctgtgtggtggagatgactgaagcccgacacggcctgagcgtccagaaatggtgctcaccatgcttccagctaacaggtctagaaaaccagcttgcgaataacagtccccgtgg

SEQ ID NO: 7603 - DNA, 248 bp, Homo sapiens
ccatcatctccaactctttaccccaacctggcaccttgtagggggctagaagggtgaggggaggtgtctttcacttatgcttaggtcactcttagaggactatcctcaaacttgaggtgacagggaactcttcacgggggcaggatttgatgttttgtttttagccatgtttgtcaatgacaatgtcaatttctagttccaatttgtacccttgtctcatttctacattaaaaacaaaaaacaatcat

SEQ ID NO: 7604 - DNA, 167 bp, Homo sapiens
  unsure (32): n=A,T,C or G
  unsure (34): n=A,T,C or G
  unsure (154): n=A,T,C or G
ccaagaacctcttccaccgggccatttctganantggcgtggccctcacttctgttctggtgaagaaaggtgatgtcaagcccttggctgagcaaatttctatcactgctgggtgcaaaaccaccacctctgctgtcatggttcactgcctgcnacagaagacggaa

SEQ ID NO: 7605 - DNA, 384 bp, Homo sapiens; identical to SEQ ID NO: 527

SEQ ID NO: 7606 - DNA, 333 bp, Homo sapiens
  unsure (287): n=A,T,C or G
  unsure (292): n=A,T,C or G
  unsure (296): n=A,T,C or G
  unsure (313): n=A,T,C or G
  unsure (322): n=A,T,C or G
  unsure (332): n=A,T,C or G
cgcgtggatggatacagagcggcttctacacggcgccatcaacattctctttatgaacgtgagtggattctccaggcaaactatgcactatttcatggtcggaaagaatcaaaggaagtttaaatgagggtggagttaaactgtgctaaattacagtagtgcttattagtaactagatttcaaaaggttacagaaaatttacattctctacacaaaaactgcatctcctgcacagacaacatcgacatcgacacaggaaggaaactgattgtccattctttgcccangaagnctcngtactttatagattcgnctttacctnttttttgttnc

SEQ ID NO: 7607 - DNA, 127 bp, Homo sapiens
  unsure (117): n=A,T,C or G
  unsure (124): n=A,T,C or G
ccatgcaggagttcatgatcctcccagtcggtgcagcaaacttcagggaagccatgcgcattggagcagaggtttaccacaacctgaagaatgtcatcaaggagaaatatgggaaanatgccancct

SEQ ID NO: 7608 - DNA, 207 bp, Homo sapiens
ccactgtgtagcaccttctaattcaatttcatcggcagttgtaataacagttccagcctcaggtgttttaatggtgggaaacatcttgattgcttctccagaaacttgaccataggttttgttttggaaatcttggagaatctcagttccttccacagcaataagttctgtgggagaagcttccatttcttctaataactcaggttt

SEQ ID NO: 7609 - DNA, 169 bp, Homo sapiens
  unsure (169): n=A,T,C or G
ctgtgctgccctgggtcctggataaaccaaaatgctttggattctggaaaacgtattgaagaggcatttataccactattaactaggaggtattttaggtgtggctaaggctctgaagtaatctcaattttcaaaatactgagattttcttccctctccggggtctatn

SEQ ID NO: 7610 - DNA, 212 bp, Homo sapiens
  unsure (140): n=A,T,C or G
  unsure (142): n=A,T,C or G
  unsure (162): n=A,T,C or G
  unsure (196): n=A,T,C or G
  unsure (204): n=A,T,C or G
  unsure (205): n=A,T,C or G
ccagtgtatggaatggtatacgatgagcacctgcccccctgaaaattgttcaggctactgtacctgtagtcattgcttggagcaaccaggctgtggctggtgtactgatcccagcaatactggcaaagggaaatgcatanangattcctataaaggaccagngaatatgccttcgcaagcccctacaggaaattantatccacnncccctgc

SEQ ID NO: 7611 - DNA, 312 bp, Homo sapiens
ccaaagctctgtgtcccagatggtgtatggcccataatccacccaacagcagcaaaggaccaggcaaaggagaacaggagcagaagcctcccagccactagccttttgggctcagtctctccaataatcctggagaggggcttcgttgggtctggacacctaccatgcattctgtgacctttccctagcttccaataaataactgtttgacgcccagagtacaggataccacaatgcactcttcctgcgtagagcacatgttcccatctgctcccattcctcaggaaccttgaattctactctgctggcctt

SEQ ID NO: 7612 - DNA, 313 bp, Homo sapiens
ctggggaaagggttgcagcagcaaggcatccgtggccgcattcagaggctggcccccctccttgcctttactctcgagtcttacttaacctaaaagacaaactgggtcaacttggtaaatgaacacagtcaaagacttagccataagaggtaagggaccagtcaatactcccaaggctggttaggcccttcaacatgtaggtggatgtgtatatgtatacatcgctacactaacatacagatctagccctatgggtatatatacgcatttatggctatatagaaaaactatgccaatactaaccacacagaac

SEQ ID NO: 7613 - DNA, 374 bp, Homo sapiens
  unsure (13): n=A,T,C or G
  unsure (50): n=A,T,C or G
  unsure (74): n=A,T,C or G
  unsure (78): n=A,T,C or G
  unsure (100): n=A,T,C or G
  unsure (101): n=A,T,C or G
  unsure (121): n=A,T,C or G
  unsure (140): n=A,T,C or G
  unsure (142): n=A,T,C or G
  unsure (150): n=A,T,C or G
  unsure (198): n=A,T,C or G
  unsure (207): n=A,T,C or G
  unsure (267): n=A,T,C or G
  unsure (282): n=A,T,C or G
  unsure (289): n=A,T,C or G
  unsure (366): n=A,T,C or G
ctgttggtgttancagtgctcttgccgcttggggcattgccattgtaaanacttgggaaatccctagaaatganccantatatgcgcttttacattttanntggagaaataaacatatgancatatatttcattacacananaaaaaganagctaggcttggccatgaacattcctttatcttcctacttaatgatanggaaatttnatggtcttctgatgggaaataccctcctgatttgcttcctgtcatcatagagatggaggngcttcatcctatggngagcggnatcagctcactcaaaggcggtaatacggttatccacagaatcaggggataacgcatgaaagaacatgtgagcaaaangccagcaa

SEQ ID NO: 7614 - DNA, 290 bp, Homo sapiens
ttttcacacttctagtaagcctctacctgcacgacaatacatgaagtgtgaaaacgtaggcttggattaaggcggcagcgatttctaggatagtcagtagaattagaattgtgaagatgataagtgtagagggaagggcttctatttcgaccgcgatgatgtggctctggaaggcgtgagccacttcttccgcgaactggccgaggagaagcgcgagggctacgagcgtctcctgaagatgcaaaaccagcgtggcggccgcgctctcttccaggacatcaagaagccag

SEQ ID NO: 7615 - DNA, 159 bp, Homo sapiens
ctgagggaccagctctacttccacctggagttgcacagtctcaggctgggggcctcaggagaggtcacagcccctcagtctcttctccttcccctgcctgcaacaggctgcctgccccgccttccccaacacctcgctccatatgatagagcgtggcag

SEQ ID NO: 7616 - DNA, 263 bp, Homo sapiens
  unsure (137): n=A,T,C or G
  unsure (166): n=A,T,C or G
  unsure (248): n=A,T,C or G
  unsure (260): n=A,T,C or G
ccacactctacttctgcttctgccacctatggggtcgaggcaggtgtggtgccttggctaagtccacagacttctgagaggcccacgctttcttcttctccagaaataaaccctgaaactcaagcagctttaatcanagggcaggattccacgatagcagcatcanaacagcaagtggcagcgagaattcttgattccaatgatcaggcaacagtaaaccctgtggaatttaatactgaggttgcaanaccaccattttncct

SEQ ID NO: 7617 - DNA, 252 bp, Homo sapiens
  unsure (226): n=A,T,C or G
  unsure (246): n=A,T,C or G
ctgatcaggtcgaggtaacccaagaggacatgcagccctggacgccacgagaaatcctgttgtctgtcagttgagtggatcaaaggtgcaccggcccagaaatggcctccagcaacaggtgcttagatgttctgttctaggggtgccagcgagatggtacagtcattgtttaccactgccttttcccatgaaaacaacgaacaactccatggggacaggaatttgncttttattctttgccatatncccagt

SEQ ID NO: 7618 - DNA, 317 bp, Homo sapiens; identical to SEQ ID NO: 664
  unsure (268): n=A,T,C or G
  unsure (278): n=A,T,C or G
  unsure (284): n=A,T,C or G
  unsure (310): n=A,T,C or G

SEQ ID NO: 7619 - DNA, 317 bp, Homo sapiens
  unsure (306): n=A,T,C or G
  unsure (313): n=A,T,C or G
ccattctgtctagctgtaaagttaggctgtgctatccaaaagagctttactttagagtcatgagaagcagcactgatctttgcaaaacttaccccaaaaaatggggagagagaaaaacaggaagaaaagtctctttcttaggctaccagtcagttaacaaagtatcttagattaagatttggaaaccaaagaatgcataattaggagtgtaccatatcatgcaaagtctatgaaatactaaataaggtaaaacagttaatcatttaaagcacgatgagcaaattctcttatcatacggctattctnatcccgnacga

SEQ ID NO: 7620 - DNA, 287 bp, Homo sapiens
  unsure (265): n=A,T,C or G
ccagaaaagatgaaatatttgaacttatccagcacacgaatacacagtgtaacaggctgcattcccaagacactggaaattttagatgttagcaacaacaatctcaatttattttctttgaatttgccgcaactcaaagaactttatatttccagaaataagttgatgactctaccagatgcctccctcttacccatgttactagtattgaaaatcagtaggaatgcaataactacgttttctaaggagcaacttgactcatttnacacactgaagactttggaagc

SEQ ID NO: 7621 - DNA, 196 bp, Homo sapiens
  unsure (44): n=A,T,C or G
  unsure (135): n=A,T,C or G
  unsure (151): n=A,T,C or G
  unsure (172): n=A,T,C or G
  unsure (173): n=A,T,C or G
ctgcatggctcccgctctccctccttcaagtctctgctcaatgncacttcattaaaggcaccttctataaactaccttgtataaaatattatttattttctctatcccggcattctaatttctcttatcctaatnaattgttctttagccnttattttgatgactattatgnntgaatacaggcagccctcacttt

SEQ ID NO: 7622 - DNA, 288 bp, Homo sapiens
ctgctcccaaatggcgaattttttttcaattacctttactggatctgccaagtttgttttgaacaatcctggttcaatgcatgagacgtgcacaccaaaagctttcatgtcccgtcttaagctgtcattgaaaccttccactgcatatttggatggagtatagccccctccaacgattgcaaggcgacctccaacactggagacattaataactctcccttgagctttcttgaccaaaggaagcatatttagtgtcacactgatgagtccaaacaggttcacttcaat

SEQ ID NO: 7623 - DNA, 272 bp, Homo sapiens
ccttgcttactgcctgcaaattttgagaaatttaaaaataagcattctaacacttttattcccacagaaaaattccaagtcaaattatcaaatcaaacacaaaaataagtcttacctcttgtataagcatgttgtactaaaaaaaaattttgaaacattttgtatattggagatctctctcatcttactgttctttgctttaaattcctggcacttctttttactgtctataagagaaaacctatcataagcccaattttttttttccactt

SEQ ID NO: 7624 - DNA, 224 bp, Homo sapiens
  unsure (186): n=A,T,C or G
  unsure (202): n=A,T,C or G
  unsure (217): n=A,T,C or G
cctgagccaccgtgccttgccacaaactatttttaatcattaaaaaagaaaaaggaaaataaggcaggccggcttctcacattacatgcttttagaaaaaggtctcatccttgaagcagctttgttatatgcagagcacagtactggcttcaaaaaatatataaaggttctgtgcactggcactgnttacatgtgaacaatngccatcaacttctgngaaaatt

SEQ ID NO: 7625 - DNA, 275 bp, Homo sapiens
  unsure (274): n=A,T,C or G
ctgctatgcaaagttctaaggcccgagtcaaatcctgggcatctccacagatgtgtggtagggcacgggctccagctcttgtgtaagaaagaacaggaatgagaacagctttattttgtagcgccaaggtctcactatgctcacacctgtaatcccagctttgagaagaggatctggcaccagaagggtctggtagaagaaagtgggaaaggtgaaggacaggaatcttttcctttctgctacaacctaaggacagaggcacatgactccagcna

SEQ ID NO: 7626 - DNA, 121 bp, Homo sapiens
ctgtagagtgggcttatcatctttcaacacgcaggacaggtacagattcttttccttgaggcccaaggccacaggtattttgtcattactttcttctccttgtacaaaggacatggagaac

SEQ ID NO: 7627 - DNA, 357 bp, Homo sapiens
ccacattggagatgtcaccttctgctctcacgcaaccacaattactgaagatgtttgtggtttcttttccagctacatgaatcacccgcaaaagatcaatcactctttccagcaagccagggaaaacctgcagatagccgagcagctcagtattcacagtcatttcgcacaggacgtcgagaagcctaattgtagccagtgcctcctcatcatcaggaggctcctcagaggccagcttgagcacagtcttgcactgatccacaaaggtgcttgcaatcaactcagcatgccgcaaaaacacagggatgtcatccttggtgagtggctcatcactcgttatcttggctatcataaggt

SEQ ID NO: 7628 - DNA, 185 bp, Homo sapiens
ccgggatgatgagaacaataacccagatatccaggatgtgcttgggaagcacgacttccatggggacttggctgactgcatccatgttgcttcactcccagatggcggcgagtctgcggaaagttcctgggtcagggatggctcggtgcttctcagggtccccaggactgcacgggatctggcag

SEQ ID NO: 7629 - DNA, 197 bp, Homo sapiens
  unsure (187): n=A,T,C or G
  unsure (196): n=A,T,C or G
cctatgatttatttgaaggtagcttttgtgtctggtgtgaggtaagggttgaggttctttgtgtgcgtatgaatctccaattgttctaggaccatctcctcaaaatcccagcaatagcttccctttcttttttggcgagctcactacgcttgaaatattttttattttccaccagcaggttcctgtnctccaccana

SEQ ID NO: 7630 - DNA, 246 bp, Homo sapiens
  unsure (238): n=A,T,C or G
ctgcaccatccccctggctgtcttcaatttattccagtttgatcccagtagggtttgagagcagaaatggaagatttcttcttcaaggatcagctcagaaagccgggatgggggcggtcactaaaggggtaggatagacggccagggccactatccctaccctctgtgtgttcctaaagtgcttatgagaggtggtggggaggggtgtcatcttcactatccccactttacggatgancagactga

SEQ ID NO: 7631 - DNA, 384 bp, Homo sapiens; identical to SEQ ID NO: 434
  unsure (361): n=A,T,C or G

SEQ ID NO: 7632 - DNA, 219 bp, Homo sapiens
  unsure (151): n=A,T,C or G
  unsure (187): n=A,T,C or G
  unsure (211): n=A,T,C or G
  unsure (216): n=A,T,C or G
ctggctgtgatttttgctacaggccacagtcaggagcacatgatagtagcattggcacaggccacggtggaccgtttttcagtgtacagttccagcaaaacctggtattctccctgaggaatagtaaattcaggattattgacaggcccancatagtaaatctcctttccttcttccacagaaaganaacttgggcagagccgcctcacanatggnata

SEQ ID NO: 7633 - DNA, 236 bp, Homo sapiens
  unsure (175): n=A,T,C or G
  unsure (234): n=A,T,C or G
ctgttgattactatactattctgtctcttcagtttaattttatgagatgatgccaaatctattttcagcatttttactttttttgccaatctgatatatgttaacagtagttcattattttaaaaattatatattttgtggtcatctttcttccacagtacttttaggcactaangaaaaatgcttctaagtatttctggtgattaccacgttttaagttttcaggaaatcatnta

SEQ ID NO: 7634 - DNA, 325 bp, Homo sapiens
  unsure (305): n=A,T,C or G
  unsure (307): n=A,T,C or G
  unsure (318): n=A,T,C or G
ctgtccattgagaacctggaccagtctctggctcactatggccggcccaagatcgacggggaactcaagatcacctcggtggaacggcgctccaagatggacaggtatgccttcctgctcgacaaagctctactcatctgtaagcgcaggggagactcctatgacctcaaggactttgtaaacctgcacagcttccaggttcgggatgactcttcaggagaccgagacaacaagaagtggagccacatgttcctcctgatcgaggaccaaggtgcccagggctatgagctgttcttcaagacaananaattgaagaanaagtgga

SEQ ID NO: 7635 - DNA, 153 bp, Homo sapiens
  unsure (112): n=A,T,C or G
  unsure (127): n=A,T,C or G
ctggcctgtcatataaaacatactgtcattgagcttaagctccgcttgttctgaggtttcacctccatgtgtttcattggtgcaaaagtggatctcttaactggtcacttanttctttctttttcanaaagatagtatgttcactggtatatt

SEQ ID NO: 7636 - DNA, 197 bp, Homo sapiens
  unsure (30): n=A,T,C or G
  unsure (31): n=A,T,C or G
  unsure (192): n=A,T,C or G
ccatcgtgcctctttgggcttccatgggcnnctacatcaccaggatggcgcagaagtaccatgagtactcccactacaaggagcaggatgggcaggggatgaagcagcggcctccgcggggctcccacgcgccctatctcctggtcttccaagccatcttctacagcttcttccatctgagcttcgcctgcncccag

SEQ ID NO: 7637 - DNA, 326 bp, Homo sapiens
  unsure (322): n=A,T,C or G
cctcctaatcctctgtggttttctgtggactcgtaaaggaaaactaaagattgaagacatcactgataagtacatttttatcactggatgtgactcgggctttggaaacttggcagccagaacttttgataaaaagggatttcatgtaatcgctgcctgtctgactgaatcaggatcaacagctttaaaggcagaaacctcagagagacttcgtactgtgcttctggatgtgaccgacccagagaatgtcaagaggactgcccagtgggtgaagaaccaagttggggagaaaggtctctggggtctgatcaataatgctggngttc

SEQ ID NO: 7638 - DNA, 111 bp, Homo sapiens
gctgccgtgaaggacacacagcctgaggacggggtggaaatggacactcggcagagcccacacgatgaagacccccaggcagtgacgtatgccaaggtgaaacactccaga

SEQ ID NO: 7639 - DNA, 278 bp, Homo sapiens
  unsure (221): n=A,T,C or G
ctgaaggtttttttattctttctttttttaaagtgagcccatgatttggtgtctttcccagattatcccctttgcgacaacacaagcaaaaatatttacaaaggtaaggcatagtcaaactacataaagagaaaaaatcatgaggaaaatacatgaaaaagactaaagacttcgccataacaaggtcttagtgataatagtgtccgtaaagatgtcatcanaattggtaaagtcaaccatgctgcaaatataccctttggattacaaaagagcacaat

SEQ ID NO: 7640 - DNA, 211 bp, Homo sapiens
ctggtattttgcctaagatctatttaagataaccttttcttatattttttacttaatattgggcataatcgtatcattcaagattaagtctgggttatttctttgataagaactgaatgtggccgggcgcagtggctcacgcctgtaatcccagcaccttgggaggccgaggtgggtggatcacaaggtcaggagatcgagaccatcctgg

SEQ ID NO: 7641 - DNA, 273 bp, Homo sapiens
  unsure (161): n=A,T,C or G
  unsure (206): n=A,T,C or G
  unsure (245): n=A,T,C or G
ccagccccactgaggagacacagcagttctaatgggtgactatgctggaggtctggtggtgccggctgtcagaggctaacagtgctgggggtcccctggctttggcttgcagaaggcagcacaagcattccactgatgtttgctgggctttcagcaagcanaaccaagctgtggagacttctatgaaactgactgaattgtttccnatagtttgcattattagtctgggcaatacctcacatctntttcttctccaaatcatattcctatctt

SEQ ID NO: 7642 - DNA, 276 bp, Homo sapiens
  unsure (236): n=A,T,C or G
  unsure (241): n=A,T,C or G
  unsure (255): n=A,T,C or G
  unsure (270): n=A,T,C or G
  unsure (271): n=A,T,C or G
ccactgacaagtttcaggcatagaatgaaaactattcttactgatatcaatgttagtcaagtttttcagagtgagcaaagtctctccggttttttccaatgatgccaaatgattttgccttaaaattaaagtttgtagagagggccaggcatcctcacaggctgaatttttcaagtattcttcaaccatcaaattttcactgagatccaagtattctaatgattttaaatgttgtnaaagnaaacaaggaaccanaaaaactttactgtnntctac

SEQ ID NO: 7643 - DNA, 127 bp, Homo sapiens
  unsure (23): n=A,T,C or G
  unsure (92): n=A,T,C or G
  unsure (104): n=A,T,C or G
ctgtcaaccgggaatactatcgncaacagatggaggaaaaggctccgcttcccaaatatgaagagagtaaccttgggctgttggagagcagngtgggggactcnaggctccccctggtcttgagaaa

SEQ ID NO: 7644 - DNA, 290 bp, Homo sapiens
  unsure (56): n=A,T,C or G
aggtctgactgagggatggctctaaatagcgggctgcccggtcttccaactcccancacagccgcccattctgttcaccccttcaactgtacaaatagccctggttgctttttttgtttttgtttaaaaaaaaagaagactcggtctttgtcattgagtccaggtattttaaaaacaccagcaaaggctataaccaggtcatgaaaatgttgaatattatcaaagacgatactaaaatattcacaaagatatttacaaaagcgattcttaaaataattgatttgcatact

SEQ ID NO: 7645 - DNA, 261 bp, Homo sapiens
  unsure (237): n=A,T,C or G
  unsure (261): n=A,T,C or G
ctgaacgcaaatcagccactttaattaagctaagcccttactagaccaatgggacttaaacccacaaacacttagttaacagctaagcaccctaatcaactggcttcaatctacttctcccgccgccgggaaaaaaggcgggagaagccccggcaggtttgaagctgcttcttcgaatttacaattcaatatgaaaatcacctcggagctggtaaaaagaggacctcggcgacctcngtcgtaccacgctaagtcgaattn

SEQ ID NO: 7646 - DNA, 349 bp, Homo sapiens
ccaagcagtccctgcaaatgggacttacgagtttggttatcagatgcactttatttgtaatgagggttattacttaattggtgaagaaattctatattgtgaacttaaaggatcagtagcaatttggagcggtaagcccccaatatgtgaaaaggttttgtgtacaccacctccaaaaataaaaaatggaaaacacacctttagtgaagtagaagtatttgagtatcttgatgcagtaacttatagttgtgatcctgcacctggaccagatccattttcacttattggagagagcacgatttattgtggtgacaattcagtgtggagtcgtgctgctccagagtgtaaa

SEQ ID NO: 7647 - DNA, 136 bp, Homo sapiens
  unsure (23): n=A,T,C or G
  unsure (59): n=A,T,C or G
  unsure (109): n=A,T,C or G
cgcagcgggattctcacacctanaccgtcgcgagcgggttctcaagttaggggagagtntcgagaatcagccgcgctgcgccttccacactgggcgctatgacttcaancctgcttctattgacacttcttctgaa

SEQ ID NO: 7648 - DNA, 217 bp, Homo sapiens
  unsure (197): n=A,T,C or G
gtttatttcttgaactttcagaaattcaagcttaaagcatcacacgtttttctaatattgtgtggcattttctgtcattttacttttttaacctttatatggaataacaaccatcagccttgtctttcagatgtgccatttgggggtgctaaagctggtgttaagatcaatcccaagaactatactgtaaatatganagtgatacttgttttttttt

SEQ ID NO: 7649 - DNA, 162 bp, Homo sapiens
ctgggggaggggcaggcacatgcattaagccccttccgtaggcagagccatggatggacagccccatgggggccttgaaggcagaggccctggaagcagcaaaaacggggctggataaagctactaatgggagggatggtagagcccagctccccagtcccc

SEQ ID NO: 7650 - DNA, 260 bp, Homo sapiens
  unsure (165): n=A,T,C or G
ctggcagcctgcttcctgcatgtattctctttatcaaccacctatttatgcagtcagcatgcctcacacctgagatgactgtgaaacaaaaaaggagactgttgctcttgccaatttttttccttaaccctgcatctcaaactcgaggcgtatacctaagtaganaaagtcccaccgcaccaaattaaccaaacgattttgttactgtgaaaagtcatctttatgtaacaaatgagaagaatagttatttataaataatg

SEQ ID NO: 7651 - DNA, 138 bp, Homo sapiens
  unsure (115): n=A,T,C or G
  unsure (125): n=A,T,C or G
ctgggggccctcaggtggagagagctgcgatccatccaggccaagaccacagctctgtgatccttccggtggagtgtcggacaagagagcttgccgacgatgccttcctgtgcanagcttgggcntatcctttacgcc

SEQ ID NO: 7652 - DNA, 264 bp, Homo sapiens
  unsure (264): n=A,T,C or G
ctgtgccataagagcattaggtggttttagctcttatctggggtatgaaagcaatttagctcatctcacagaaacaaaagcaggtgctgaatcatgaaaacctcaattatttttagcatgcctcttaatttttctttcccctggtttcttgtcgtctgtgcttgattcttgaacaggtaaccacttgagaggatgccggcgatagatgggccatggaggaagtgtcagcaaacatgaaaaagcaaatccggccataactatatn

SEQ ID NO: 7653 - DNA, 272 bp, Homo sapiens
cgggaaatgactgtctggttttattatggtttataaattaataaatgggctatttaattctgtatataaatttacagcaagtaccgtacactggaataaatgaggcaatcacgttacaccaaatcagcagatcaaaagacaaacacatatttctgagacttgaaggtccacatccccccgccccctgccaagatggagtcttgctttgttgctcaggctggagtgcagtggcgcagtctcagctcactacaacctccatcccccgggttcag

SEQ ID NO: 7654 - DNA, 130 bp, Homo sapiens; identical to SEQ ID NO: 7318

SEQ ID NO: 7655 - DNA, 251 bp, Homo sapiens
  unsure (161): n=A,T,C or G
  unsure (218): n=A,T,C or G
  unsure (235): n=A,T,C or G
gagccatttctaatctttctctggggggaacaggccacagaactgtgttagaggtgaaccatcttaattactagttctattacctaattcagcttccttgtttggtctgctgtggatctgccttattgcatatgccatgcatcacataatggatgcatcanataatggtgttagacaaagcttcattgtgaacaacctaatgcattttacagaaacantctcatcacattttttntagcctttcctacatt

SEQ ID NO: 7656 - DNA, 256 bp, Homo sapiens
  unsure (254): n=A,T,C or G
aacttatggaagcacattaaaagttacataaatattaccagagagcctgatgctctctgatagctgtgccataagtgcttgtgaggtatttgcaaagtgcatgatagtaatgctcggagtttttataattttaaatttcttttaaagcaagtgttttgtacatttcttttcaaaaagtgccaaatttgtcagtattgcatgtaaataattgtgttaattattttactgtagcatagattctatttacaaaatgntt

SEQ ID NO: 7657 - DNA, 345 bp, Homo sapiens
ctgatggaaaacatcagcgtgcatttgggttcctaaatcatttcaaaacattaatcaggaagactcacagcacccagtcctatctaagccatagattcctcatttagggaatgggatgatctcacattcacatgatctgtaagggctctatttatcccagcacagttcaattaggctgaattgcaggaggcataagaaatgataatcaggagagaaattatggcaaaggcagttcaactccctacaaaggggaaaaactacaagctccagaaaggccaagtgccagtccacattacacaatggtatttgccggaacaacaagcagattacagccctgcacggtac

SEQ ID NO: 7658 - DNA, 124 bp, Homo sapiens
cctagaagatgctggaaggtaccaccatctttgttgggaagggaatgcgatgacgagctggaaggttcctgttctcgtctgtaaaatgactgtttgaaggtgaaaaacatccatgttttcttca

SEQ ID NO: 7659 - DNA, 298 bp, Homo sapiens
  unsure (207): n=A,T,C or G
  unsure (259): n=A,T,C or G
  unsure (265): n=A,T,C or G
ggacacactgtgcagtgggtgattcacagcgtgggcccaccttagctgctgctctagagtactgctgttcccactcactaagtgattctttttttaatattctcaaattgatgatgctaagaacatcttcacggattgaaggaagtgcaaaataaggtcaaatcctgagttggcaagtacttctgttcttaagattgtttatactanctggtcttattgttgtaataagtaggaaaaggtccttttcaaatttcattcngcctancttttcctttatgtgataattctttgttcaaag

SEQ ID NO: 7660 - DNA, 188 bp, Homo sapiens
cctgagttcataccctggttctgcatttagcttctgttacctgtaaagacttgaaaaatttactcaacctttctaacctgttctctcataattgtgatgttaattgctagttgaaagaacagcatggtgtatgtgagacatatggaatagtccgtggcagataggagtactcacctatgtatattcca

SEQ ID NO: 7661 - DNA, 284 bp, Homo sapiens
  unsure (161): n=A,T,C or G
  unsure (225): n=A,T,C or G
  unsure (244): n=A,T,C or G
  unsure (249): n=A,T,C or G
  unsure (270): n=A,T,C or G
ccaccccggagatgacacgaggctcacatgactctagacacttggtggaaagtgaggcgagaaaaacaatgacttgggccaattacacgactgcaaagctagagctgccaacagggctccagggagcttggcttctgtagaagttctaaggaagcggtacnaactccacggcggtggggcgctaactagcagggacccctgcaagtgttggtcgggggcctcganctgcctgagctgacacgangggangggtctgcgtagccaacaggngaccgaagggcttg

SEQ ID NO: 7662 - DNA, 246 bp, Homo sapiens
ctgacaaggaaaagatcacatctcttccaacagtgacagtaactcaggaacaagttgatatgggtttagagtgtccagtatgcaaagaagattacacagttgaagaggaagtccggcagttaccttgcaatcacttctttcacagcagttgtattgtgccgtggctagaactgcatgacacatgtcctgtatgtaggaagagcttaaatggtgaggactctactcggcaaagccagagcactgagg

SEQ ID NO: 7663 - DNA, 416 bp, Homo sapiens
ctggaaggacaagcctctggtcaaggtcacattcttccagaatggaaaatcccagaaattctcccatttggatcccaccttctccatcccacaagcaaaccacagtcacagtggtgattaccactgcacaggaaacataggctacacgctgttctcatccaagcctgtgaccatcactgtccaagtgcccagcatgggcagctcttcaccgatggggatcattgtggctgtggtcattgcgactgctgtagcagccattgttgctgctgtagtggccttgatctactgcaggaaaaagcggatttcagccaattccactgatcctgtgaaggctgcccaatttgagccacctggacgtcaaatgattgtcatcagaaagagacaacttgaagaaaccaacaatgactatgaaacag

SEQ ID NO: 7664 - DNA, 208 bp, Homo sapiens; identical to SEQ ID NO: 278

SEQ ID NO: 7665 - DNA, 258 bp, Homo sapiens
  unsure (173): n=A,T,C or G
  unsure (197): n=A,T,C or G
  unsure (198): n=A,T,C or G
  unsure (216): n=A,T,C or G
ctgaaaaatatttagatctacttgctctaagaataaggtcaacattaaacattctcagatgaaaagcttgctggatgaaatagtgcaccatcagaataaagcatgcaatatatttacagtcagatgaaacaagtgtgtccataaatcaaccaaaagaccatctcctcctttangaaatacatgtattgcttagccannaccaataagttaacgtcntgtgaataattttgggtattctggccttcctgaatctcatac

SEQ ID NO: 7666 - DNA, 463 bp, Homo sapiens
ccactggctcaccagcttcccaccctagcattcattgctagcttaccaatcttaaggctaataattttatcgcacattcaacttcaaaacacaccagtgtttaccattaccactaatcactgaatgccatgaagccatggcactgaaccaggagctttcaccttttatgtgaatttaaaatggtactgtggaggctgaggcaattttcttcaggctaacccagattttctaaagcccaacttaaaaggtctacacctgccaaactaaaaaaaacgcagccacttgaaaataaaccagcagagcattgccatcactccgataaagctgcaggtttcatcacatgcaccagacaaatctacagggctagtttcagttctctccttttaaagaatttattaagcctgttataccacacagtatgttttatacactgacatacaactccctaataagataaagcaaa

SEQ ID NO: 7667 - DNA, 279 bp, Homo sapiens
ccacaacaactgacgcggcctgcctgaagcccttgctgtagtggtggtcggagattcgtagctggatgccgccatccagagggcagaggtccaggtcctggaaggagcacttcatctgtttagggccatcagcttcaaagaacaagtcatcctcattgccactgtaataagccatcatttcactggcgagctcaggtacttctgccatggctgcttcagacacttgagcaatgaagattggctgaagagaatcccagagcagcctgttgtgccttgtgc

SEQ ID NO: 7668 - DNA, 448 bp, Homo sapiens
  unsure (5): n=A,T,C or G
  unsure (36): n=A,T,C or G
  unsure (107): n=A,T,C or G
  unsure (136): n=A,T,C or G
  unsure (142): n=A,T,C or G
  unsure (221): n=A,T,C or G
  unsure (222): n=A,T,C or G
  unsure (238): n=A,T,C or G
  unsure (321): n=A,T,C or G
gtttnaataaatgttgtggacttccatttgtcaaanaccaaaacaaaggaaccccaaccttacatgtaatacaaacttaactcaaaatggatcatatatctaaatgnaaaatggaaagctataaaactgaaaacanactatntttacaacctatgcgtaggtatagtttttagacattacaccaaaagcacatgccgtaaaagaaaaaatagataaattgnnggatttcattaaaatnaaaaaactttttctctctgaaaaatcctgttaagctgggcgctgtggttcatgcctgtaatcccagcactttgggaggctganttgggaagaaattaatagcttgaggccaggagttcaagatcatcctgggcagcaaagtcatacactcttgagggaagagagagaccttctcatattgttttatattgttttatactcagtacctgtt

SEQ ID NO: 7669 - DNA, 297 bp, Homo sapiens
ctgtgttggtagtgctgtgttgaattacggaataatgagttagaactattaaaacagccaaaactccacagtcaatattagtaatttcttgctggttgaaacttgtttattatgtacaaatagattcttataatattatttaaatgactgcatttttaaatacaaggctttatatttttaactttaagatgtttttatgtgctctccaaattttttttactgtttctgattgtatggaaatataaaagtaaatatgaaacatttaaaatataatttgttgtcaaagtaaaaaaaaaa

SEQ ID NO: 7670 - DNA, 161 bp, Homo sapiens
  unsure (11): n=A,T,C or G
  unsure (34): n=A,T,C or G
  unsure (156): n=A,T,C or G
  unsure (158): n=A,T,C or G
ccactgcttgngaagctaaaggtggtgaaggcanacacaggcaatggggccaggagcatatgcctttcaattccttcctggcaaccttcctgtcttctcctccactgactcttccctctcatcaccctctctatggtgccaaaataggcttattgnantgc

SEQ ID NO: 7671 - DNA, 388 bp, Homo sapiens
  unsure (361): n=A,T,C or G
  unsure (380): n=A,T,C or G
attggctggaacattttaaaccttttcagcatcgatcctatttaaatactttgtagtacccttcatgagcaatgattaagactacaaaacaaaggaagaggtataataaggatggttcccatctgcctattttcttaatctatttgtctactctggcttccctagattgtgcctgctttctcagaatgaaaagaaaattaataagtgtttcaaaagtatgtactcaagagccagtttgccagagtacacgtcattcttgccattgcttagactggttccacattgtaaaaaaatgtagtgctaatcctgatcaaatgaatatgcctcccacatccatctcccttttacctgttacaattgnctaagactaattctcattnctttattt

SEQ ID NO: 7672 - DNA, 468 bp, Homo sapiens; identical to SEQ ID NO: 435
  unsure (398): n=A,T,C or G

SEQ ID NO: 7673 - DNA, 315 bp, Homo sapiens
  unsure (171): n=A,T,C or G
  unsure (191): n=A,T,C or G
  unsure (204): n=A,T,C or G
  unsure (276): n=A,T,C or G
  unsure (284): n=A,T,C or G
  unsure (297): n=A,T,C or G
  unsure (313): n=A,T,C or G
ccagaaaggaaactgacgagcaggtcacataatcaggagccagactcctgagttgtaactgggcccccaactttccgtgtgattattaaaagagcccttcttcttttctaaaacttagtgccaaatgctgaggagcataatgtaggtgagaatttttttttttgggggggngaaaattaagctaaagcttnttgaagtacctantttccaggggctttttattgtatttttccttatggccctaaaatgacatcaacttggaaatgaagcttttgntgaaaaanctggaggtgatantggtggtgattttggnag

SEQ ID NO: 7674 - DNA, 414 bp, Homo sapiens
cctctctccataccgagccttgctggactctctacagcttggtcctgattccctcacggtccatctgatccatgaggtcaccaaggtgttgctggtgctagagcttcaggggcttcaaaagaacatgactcggttcaggattgatgagctggagcctcggcgaccccgataccgtgtaccagatgttttggtggctgatccaccaatagcccggctttctgtctctggtcgtgatgagaacagtgtggagttaaccatggctgagggaccctacaagatcatcttgacagcacggccattccgccttgacctactagaggaccgaagtcttttgcttagtgtcaatgcccgaggactcttggagtttgagcatcagagggcccctagggtctctttctcggataaggttaatct

SEQ ID NO: 7675 - DNA, 266 bp, Homo sapiens
gaaaatcattcaaccaagagaagagtcaagtgaatatcgtttgtttatttgctagtgagtttctttgtaacgttgattttattaaatgataatatttggttagtatgtcctatgttaataaaaatgaacaaaattaattttgctatgttcaggtgtcttgataaaataacaatgctccagtgttgttgcttacatttagcactaaattttaacacagggtcagtgagtccaggttttaacttcttcatgcctggatgggataaaat

SEQ ID NO: 7676 - DNA, 376 bp, Homo sapiens
  unsure (15): n=A,T,C or G
  unsure (256): n=A,T,C or G
ccagtggaatgatgntccctgcaattaccatctcacctatacgtgcaagaaaggaacagttgcttgcggccagccccctgttgtagaaaatgccaagacctttggaaagatgaaacctcgttatgaaatcaactccctgattagataccactgcaaagatggtttcattcaacgtcaccttccaactatccggtgcttaggaaatggaagatgggctatacctaaaattacctgcatgaacccatctgcataccanaggacttattctatgaaatactttaaaaattcctcatcagcaaaggacaattcaataaatacatccaaacatgatcatcgttggagccggaggtggcacgagtcaaggcgctgatcccta

SEQ ID NO: 7677 - DNA, 227 bp, Homo sapiens
ctggctttctgtatgttgcaaaataatctattcacagtagcaataaaaactcaaaagtacttaataaatttaataaggaatatgcaatactttaataaaacattataaaaggacagataaagcctgaataaaaagagccacatcatattcttggatgggaagacccaatatggtagaaatgtccattttctcccaaattactccctacatttattctgatttattca

SEQ ID NO: 7678 - DNA, 101 bp, Homo sapiens
ctgggaagccacgagaatattgtgaacctgctgggggcgtgcacactgtcaggaccaatttacttgatttttgaatactgttgctatggtgatcttctcaa

SEQ ID NO: 7679 - DNA, 317 bp, Homo sapiens
  unsure (147): n=A,T,C or G
ctgggtgtggacatcatggataagggggtagagacgctcccctgtgtggaacaccttctaatggcttgtgcacggcctagctcacaccccagcatcccagggctcgtatggagtggagcactgaggacatctgggttcttctcccanaactgctccttctaggctatgacatttaacacttgatcttctaacatcaggtacttttaatgactgggcctggtattggtggtcagcccatctcagcaatgtgtccagggcccagccaggactgggtgccttaagtgggggcggaaaggatcgtcccatgaagaaagtga

SEQ ID NO: 7680 - DNA, 258 bp, Homo sapiens
  unsure (196): n=A,T,C or G
  unsure (209): n=A,T,C or G
  unsure (215): n=A,T,C or G
  unsure (240): n=A,T,C or G
  unsure (243): n=A,T,C or G
ccaactctagtcatacttggacctcgtggaaacatgttgttttctttgattggagagggacacaaagataaattatttttatatacttcaattgctttaaagtattacaaagacagggggcagatcacagataataaaattggaataaaactctataaagattctttgccaccttcaccattgctatttcctggcnaagtaacagtagnaccaanttactgatacgattggcaatagcanacncctggacatcataga

SEQ ID NO: 7681 - DNA, 396 bp, Homo sapiens
ctgcacctccacctccgtcttctcctctgccaagcaaatccacatcggctccacagatgtcgcccggatcttcagacaaccagtcctctagccctcagccggctcagcagaaactgaaacagcagaagaaaaaagcctccttgacttctaagattcctgctctggctgtggagatgcctggctcagcagatatctcagggctaaacctgcagtttggggcattgcagtttgggtcagagcctgtcctttctgattatgagtccacccccaccacgagcgcctcttcaagccaggctccaagtagcctgtataccagcacggccagtgaatcatcctctacaatttcatctaaccagagtcaggagtctggttatcagagcggcccaattcagtcga

SEQ ID NO: 7682 - DNA, 185 bp, Homo sapiens
  unsure (49): n=A,T,C or G
  unsure (88): n=A,T,C or G
  unsure (129): n=A,T,C or G
  unsure (159): n=A,T,C or G
  unsure (162): n=A,T,C or G
tggttaaagttcacgttctctttggggaattttacaatttaagtttaanagcttttaattaaacgtaaatgtacaccaatctactcancagagatatattaggatcacatttcttttttaaaatggatnttattttaatgtgtaacaaaaagattttgnttncctatttaaaaaatacaatacac

SEQ ID NO: 7683 - DNA, 271 bp, Homo sapiens
  unsure (30): n=A,T,C or G
  unsure (35): n=A,T,C or G
  unsure (66): n=A,T,C or G
  unsure (91): n=A,T,C or G
  unsure (247): n=A,T,C or G
cgaggtccttggatgcagatcaatgctccnataangttcattatcagctcctcctgccttgtgacnggatgatttgattttacaaaagtcnctttgaaaacaagagtaaacgcagacagcttctagagaaaagtctggtgaagcagcagttgataatagattttcttttagtgatgaaattaatcttgttttggtaatctacagcctgttagggataggtggagggatgaagtccttaaaactaaantgttcctctacgaatcttcgacct

SEQ ID NO: 7684 - DNA, 280 bp, Homo sapiens
  unsure (1): n=A,T,C or G
  unsure (3): n=A,T,C or G
  unsure (210): n=A,T,C or G
  unsure (272): n=A,T,C or G
  unsure (276): n=A,T,C or G
ncnggaccacagataaatcctagttaaattttatagttatcttaatattatgattttgataaaaacagaagattgatcattttgtttggtttgaagtgaactgtgacttttttgaatattgcagggttcagtctagattgtcattaaattgaagagtctacattcagaacataaaagcactaggtatacaagtttgaaatatgatttaancacagtatgatggtttaaatatttctctaatttttgaaaaatcgtgccaagcaataagattnatgnatat

SEQ ID NO: 7685 - DNA, 326 bp, Homo sapiens
gaattctggttgtttgtgcaataatcatagtgatttacattgcttttcttctttcagagcaataagaaagttatttggggtagtacttgaaataattcatatacacagtcatttaacatagatcgtttctagtcgagtatgagcatacattcatgggaacaatctgtttcattcttcaaagtatgtttgtactttggaatgaaggagaaattctagggaaaaattaattcagaaatcttttgaaataagacagttcaaacctaggaccaggtaaccacattgcattgcctcccagtgtgatatgactgtgcttccaagtatgcatc

SEQ ID NO: 7686 - DNA, 252 bp, Homo sapiens
  unsure (239): n=A,T,C or G
gtcctttgcttctaatgacaaaactgtgagagctagatgtcctatgggcaattaggtagtataataaaggtaaatgaaggtacaatttttaaaccattattttcaccctgttggggtaaatgttttaaagagtgagaaaacataaattgagaaagggtgataaagtaatagataacttttagtttaataataattattgttattatactactaataatagagcacttgtaagcactaanttatctttatcca

SEQ ID NO: 7687 - DNA, 388 bp, Homo sapiens
cagacatcgagaagcataatgacattgtggacagtgacagcgatgctgaggatcgaggaacgttgtctgctgagctgactgctgcccactttggaggaggcggtgggctccttcacaagaagactcaacaggaaggcgaggagcgggagaaaccgaagtcccggaaagagctgattgaagagctcattgccaagtcaaaacaagagaagagggagagacaagctcaacgagaagatgccctcgagctcacggagaagctagaccaagactggaaagaaattcagactctcctgtcccacaaaactcccaagtcagagaacagagacaaaaaggaaaaacccaagcccgatgcatatgacatgatggttcgcgagcttggctttgaaat

SEQ ID NO: 7688 - DNA, 369 bp, Homo sapiens; identical to SEQ ID NO: 7545

SEQ ID NO: 7689 - DNA, 124 bp, Homo sapiens; identical to SEQ ID NO: 436
  unsure (18): n=A,T,C or G
  unsure (19): n=A,T,C or G
  unsure (25): n=A,T,C or G
  unsure (107): n=A,T,C or G
  unsure (124): n=A,T,C or G

SEQ ID NO: 7690 - DNA, 210 bp, Homo sapiens
  unsure (174): n=A,T,C or G
  unsure (192): n=A,T,C or G
  unsure (207): n=A,T,C or G
ccaatatgcctttggagcacagcctatggtttatgtttcttttatgaccacctttaatatctgtcaaacgactagacatgctatagctttacccgaaggtaatttgattgactgtgctctgctagaagatggtgtatgggtccctctcgacgtaactgccaataaatgataagnggtatttgttttagatantgcctctacctcagncgg

SEQ ID NO: 7691 - DNA, 264 bp, Homo sapiens
tcgaccctgaataaggtggtacaactaaggcatattatggaaaactggcattattgcttaatgtaacatgagggattggaatttctttaaagtaattttaagatatgattatttagcagaaatattcactggagcattttacttttagaaattatcgtcacacaaggaagcctttataggaccgactacctaattgcagtcaaagatctcttgaatgaatgaacacacacacacagaagaacacacattttaagaatatagcgg

SEQ ID NO: 7692 - DNA, 314 bp, Homo sapiens
  unsure (175): n=A,T,C or G
ccatataaagggcgtcctgaaaacaaaagcttcctttatgagatagtatctaataaaagaaatggcattgatgtggacaaatgggattattttgccagggactgccatcatcttggaatccaaaataattttgattacaagcgctttattaagtttgcccgtgtctgtgaagtanacaatgagttgcgtatttgtgctagagataaggaagttggaaatctgtatgacatgttccacactcgcaactctttacaccgtagagcttatcaacacaaagttggcaacattattgatacaatgattacagatgcttt

SEQ ID NO: 7693 - DNA, 255 bp, Homo sapiens
  unsure (162): n=A,T,C or G
cccaatcaagggaagaaggaggaatgctggactggaggcccctggagccagatggcaagagggtgacagcttcctttcctgtgtgtactctgtccagttcctttagaaaaaatggatgcccagaggactcccaaccctggcttggggtcaagaaacagccancaagagttaggggccttagggcactgggctgttgttccattgaagccgactctggccctggcccttacttgcttctctagctctctaggacct

SEQ ID NO: 7694 - DNA, 186 bp, Homo sapiens
ccatgtggagaaatcagatcactgcttaatgaaaggaattgaccaccgtcagctcgaaaatccacccacagtctagaattgggtgtttatcaggcagaagttctctccaaagacatttttagcatgtatctagtcaacaaactataagagagaaaacccaaagcttaaaggagggtgtgtaagggg

SEQ ID NO: 7695 - DNA, 161 bp, Homo sapiens
cctttcttgtctggccccctaaagaggacccaagatcaggaaaactccccagtttaaaaaaatatctgtccatctgtatataaaatacctattattagctggagttgcacacatgcaggaccaggagagactgcctgaggttctgcctggaccgaaggagg

SEQ ID NO: 7696 - DNA, 217 bp, Homo sapiens
ccacatcttcttcctgagcctactattcatattgccttatattcacaaagcaatggtgccaaggaaagagaagttaaagaagatggaataatccatttccctgcaggtggcctgtgcgggactggtgcagaaactactcgtctcccttttcacagcactcctttgccccagagcagagaatggaaaagccagggaggtggaagatcgatgcttccag

SEQ ID NO: 7697 - DNA, 220 bp, Homo sapiens
  unsure (24): n=A,T,C or G
cgaggtttgcagtttaagtattgnaatttcacaaaagacataggacttaactggaaaatgaaaaaaaaaagaaaaagaaaaaactaaacaaaaaatccctctaggtagtttaggtgaaaaatgtcccttttattttggctttggttgtgatttcaaagcataatgctatgtttttttgtctttttactatgtttttcggatttttaagtccgtaagtgca

SEQ ID NO: 7698 - DNA, 224 bp, Homo sapiens
ctgggcaagaaatgcctcaggaggtttttatttttcctcttcagatagatgttgcttcctgccaattgcatcctgtacccactgttccttctggattccatgatttaccatccagcagggcttttctgagtcgtctccagaagatgtgccgccccaggacactgtcctcccactccaggtaagtgttcctgctgagaaggcggtacagctccacctgctgcctg

SEQ ID NO: 7699 - DNA, 232 bp, Homo sapiens
  unsure (222): n=A,T,C or G
cctgaacaaatgtttcatttggatccttctttgactcatacaatatttaatccagaagtatttcaaccacagatggcactgccaacagcagatggcccataccttcaaatattagagcaacctaaacagagaggatttcgtttccgttatgtatgtgaaggcccatcccatggtggactacctggtgcctctaccgaaaagaacaacaagtcttaccctcangtcaaaatct

SEQ ID NO: 7700 - DNA, 246 bp, Homo sapiens
  unsure (156): n=A,T,C or G
  unsure (195): n=A,T,C or G
  unsure (234): n=A,T,C or G
cctaatgaaaattgtacacttcaacacaaggtaattgaaaccttccttttgactgaaaccagtgtttgtagcactagtatattcctgcagacagacttgtagttacttgtagttattgtatagtctgtatagtctgttatttttttttttaagcanaaagtcaaaaaaattgttttatgtaaatatatataaaangtgaaggtacaggagggactatggcactgtgtgtgatgnaaaagggtattg

SEQ ID NO: 7701 - DNA, 152 bp, Homo sapiens
cgggattctgttatttgaggctcagcacagccagagaaacccccaagatgcagccgggaggtgaacagcggagaggacaatgcacccttcagcgtggtggagcctcagggacagatctgatgatcccagaaggctctggaggacaatctagg

SEQ ID NO: 7702 - DNA, 418 bp, Homo sapiens
  unsure (306): n=A,T,C or G
  unsure (397): n=A,T,C or G
cgcgtttcccgcaacccgataccatcggacaggatttctccgcctcagcccaacggggagatctctggaaacatggctacagaacatgttaatggaaatggtactgaagagcccatggatactacttctgcagttatccattcagaaaattttcagacattgcttgatgctggtttaccacagaaagttgctgaaaaactagatgaaatttacgttgcagggctagttgcacatagtgatttagatgaaagagctattgaagctttaaaagaattcaatgaagacggtgcattggcagttcttcancagtttaaagacagtgatctctctcatgttcagaacaaaagtgcctttttatgtggagtcatgaagacttacaggcagagagaaaaacaanggaccacagtagcagattcta

SEQ ID NO: 7703 - DNA, 176 bp, Homo sapiens
ccagataaaatagtaacaaaaaaagtaaagagatataaaacaaactgtacactattacaaagtagtggttctctgtatgtctatgtgtatatatgtatatataaaactatacagatacatgtgtgtatataaacatacatatgtatatatacacacatatacttaattctaaagtt

SEQ ID NO: 7704 - DNA, 458 bp, Homo sapiens
ccttggtcctagcacccactcgagaattggctcagcagatacagaaggtggtcatggcactaggagactacatgggcgcctcctgtcacgcctgtatcgggggcaccaacgtgcgtgctgaggtgcagaaactgcagatggaagctccccacatcatcgtgggtacccctggccgtgtgtttgatatgcttaaccggagatacctgtcccccaaatacatcaagatgtttgtactggatgaagctgacgaaatgttaagccgtggattcaaggaccagatctatgacatattccaaaagctcaacagcaacacccaggtagttttgctgtcagccacaatgccttctgatgtgcttgaggtgaccaagaagttcatgagggaccccattcggattcttgtcaagaaggaagagttgaccctggagggtatccgccagttctacatcaacgtggaacga

SEQ ID NO: 7705 - DNA, 253 bp, Homo sapiens
  unsure (232): n=A,T,C or G
cctactatgggtgttaaattttttactctctctacaaggttttttcctagtgtccaaagagctgttcctctttggactaacagttaaatttacaaggggatttagagggttctgtgggcaaatttaaagttgaactaagattctatcttggacaaccagctatcaccagactcggtaggtttgtcgcctctacctataaatcttcccactattttgctacatagacgggtgngctcttttagctgttcttacg

SEQ ID NO: 7706 - DNA, 275 bp, Homo sapiens
  unsure (133): n=A,T,C or G
  unsure (149): n=A,T,C or G
  unsure (167): n=A,T,C or G
  unsure (177): n=A,T,C or G
  unsure (195): n=A,T,C or G
  unsure (238): n=A,T,C or G
  unsure (247): n=A,T,C or G
  unsure (274): n=A,T,C or G
ctgtcatcctatggcataaattccacttttattccctaagtgctttgagggctctatttggcaaatattacaacagatgctgaaatacaggagttgtgagtactacaatttgtcatctataccacacaaccanaatctgtatataaganatctacaaatcaaaatgnacgaggccantttctcatgcttcaccanctacacaaagcagtaaagacagacaatatacaagatttattangtaaaacanaacagactgcatgatatgctattccant

SEQ ID NO: 7707 - DNA, 163 bp, Homo sapiens
caggtcctgtttgattgtagctatgttggtgtatctcgtgtacaagatggaaaagtgcttttgttgttctacctgatccagttgggggagcaggaatagggggtgcctgcctaacggcctctagcccatgtgcttatactgggatctgtcccgagggatctgc

SEQ ID NO: 7708 - DNA, 334 bp, Homo sapiens
ccaggaggagtcttagaggtgctaaatggctttcagacattccaatgacatctgagtcaagataattttccattttagaattagcctgtagatctgtaaagtcgcaggaaatgatacctgtatactgctaaatacaaatttaagaactttctagacatgtctgtacttgaaagggttctgtaatacattttaagtaatgtgtttactccaaaagctgctttccgtgaacatttaagtatctcataggtgaagttaaaaatcacagtcattcccacccttacccctgtacctatattatataagccatacctacccttacaaatgcctctctgga

SEQ ID NO: 7709 - DNA, 327 bp, Homo sapiens
  unsure (164): n=A,T,C or G
  unsure (269): n=A,T,C or G
  unsure (282): n=A,T,C or G
  unsure (302): n=A,T,C or G
  unsure (314): n=A,T,C or G
ccaggccgatctcgaacttctggcctctagcgatctgcccgcctcggcctcccaaagtgctgggatgaccagcatcagccccaatgtccagcctctttaacatcttctttcctatgccctctctgtggatccctactgctggtttctgccttctccatgctganaacaaaatcacctattcactgcttatgcagtcggaagctccagaagaacaaagagcccaattaccagaaccacattaagtctccattgttttgccttgcgatttnagaagagaattanagagggctgtattgattggngtgaagactganctatcccggggtc

SEQ ID NO: 7710 - DNA, 275 bp, Homo sapiens
ccttggtgaaggcagatcccgacgtgacgctagcgggacaggaagccatcttcattctggcacgagccgcggaactgtttgtggagaccattgcaaaagatgcctactgttgcgctcagcagggaaaaaggaaaacccttcagaggagagacttggataatgcaatagaagctgtggatgaatttgcttttctggaaggtactttagattgattgccgagcggggcagttttgtgagccttcatctaaagccttcagttcacccctctgcacagg

SEQ ID NO: 7711 - DNA, 281 bp, Homo sapiens
  unsure (160): n=A,T,C or G
  unsure (187): n=A,T,C or G
  unsure (256): n=A,T,C or G
ctgatcataaatagagcaagagaagatggggagcaatagagaaagatgttgaaagaaagacatcttcatcaagtgtaaggtgagaaggaaccaattggtggttcatgcacataataccaaaacagagaataaggacttcggcaggctttttaaagcacanactccatgtagtttctagctggctaancaaacaaaacaaatgtattataaggaggtgttaattacaaaagtgaccagttcttgccatgaattttanagcaccccaacagttctaacgtctc

SEQ ID NO: 7712 - DNA, 273 bp, Homo sapiens
caatgtggttggtcttcagcttgcagttagccaggttccataccttgaccagcttgtcccagccacaggagacgatgatagggttgctgctgttgggcgagaagcggacacaagacacccactctgagtggctctcatcctggacagtgtatttgcacacacccagggtattccatagcttgatggttttatctcgagatccagagacaatctgccggttgtcagaggaggaggccacactcagcacatccttggtatggcccacaaatcgcc

SEQ ID NO: 7713 - DNA, 351 bp, Homo sapiens
  unsure (304): n=A,T,C or G
cctttcatctgatgaagagcactgaattattcatactagggtttgaccaacaaagatgctagctgtctctgagatacctctctactcagcccagtcatattttgccaaaattgcccttatcatgttggctgcctgacttgtttatagggtccccttaattttagtttttagtaggaggttaaggagaaatcttttttttcctcagtatattgtaagagagtgaggaatacagtgatagtaatgagtgaggatttcttaaatgtacttttttttgttctaggaatgagggtaggataaatctcanaggtctgtgtgatttactcaagttgaagacaacctccaggccattcc

SEQ ID NO: 7714 - DNA, 282 bp, Homo sapiens
  unsure (247): n=A,T,C or G
  unsure (253): n=A,T,C or G
ctgaagatttggtatcacaggtttttaatgactattcacaattcaatagcaagtgggaagtgaggttaagaaaggggattaaactccacaactgcaatgagtatctgaaatccttggttttagatgcggggatgggggtgaacaaaaaggatgacagagcaaagtgctaccaggaggagaagtccagtctgcatgaagatttgtctttaataaataacttcataaactgtggccttcttatccccanagccantgacaatgtatttgtcgccacggagatgt

SEQ ID NO: 7715 - DNA, 250 bp, Homo sapiens
  unsure (226): n=A,T,C or G
  unsure (230): n=A,T,C or G
ccaatttcttcactctcctgacactttgaagtaaccactcaactccacagacttcttgttgagacttttttgcatggaaaacagatattttgggggggggcattatatgctaccgatattaggataaaatgtgtttacctagaggtttctaggagagagtactgttctcttctggtgagggaagagaggattgtgaaaatatttctccttgaagcatcagcatgtntcanatcaaaatcttgacccgagg

SEQ ID NO: 7716 - DNA, 218 bp, Homo sapiens
  unsure (78): n=A,T,C or G
  unsure (187): n=A,T,C or G
  unsure (188): n=A,T,C or G
  unsure (201): n=A,T,C or G
cctactgtaaagagatgatgcatggtaaaaggaaaatggcagctctatgttattaccagtagtgaaggtgaatgatanattgttacatacagagtaagacttaaatgttgtgaagtttcctacagtttgacaaccaaaacatctaaaaaattcaaataaattttaaggtaatcttgatcttggttgnnagttgcaccaganaggacaccttattttta

SEQ ID NO: 7717 - DNA, 451 bp, Homo sapiens
ctgtctgaccatggggaccttctgtctgaagaggagctggatgaatgagactctgggaatcatctacacaggaccaaacccaacaggcgccctggcaccggggaggcgggtagttgtactctgcttgtacagtccttgagcccagtttacagatctggagagcaggaggccaggacaaggacaaaggctggaggatggagtaggacccaggggctctgccatcctaggcatcattcaaggtcttttatgaagactttacagatgtcctctgtaagtagcatcgagagtggagttcagctcctttctctacttttttttggtctgatggcacatatttattgttctgtggtctaatcacagtgtttctaaatgtaaaaagtgcatatgttggtgtagctagtcccgcgacattgagctcctctgcatgaagacactgggctcctgcatccag

SEQ ID NO: 7718 - DNA, 101 bp, Homo sapiens
ccagtggggcagcccttccccattggggtttccattgcgagcaaagttggcccagaatttcatcaccatcttgctaagtctgatctcctcttctgaggcac

SEQ ID NO: 7719 - DNA, 139 bp, Homo sapiens
ccaagtcagtcccagccagaaggctgtgtctccagggagtggctgacctgatccttcttgcccattcttggggttctgggacttggaggaactcaagtcttcgctgtaagaaaatccctccaggacaacaaactgttaa

SEQ ID NO: 7720 - DNA, 390 bp, Homo sapiens
  unsure (367): n=A,T,C or G
cctcttggctctggagaaggcatccttagcatcctcttctgaagggtgatcataagccccaagttaattaaataggcccaatgtctgcctgctctttctgtattcccttcctgaatctagttcatgtcaacaaatgtgtactattattgtagaaaatcgaatgctctcatacttttaataggtttgcttcttggttaatatgcccaggtcaggaagtggcttatatttcaggagtgctctctaatacttattgcagatattcaagcatttattctctcacacacacgcacttaaaaaccgcacactacctcacactctgcaataatccgatagtatggtggtcatcatacccacatatatacatganaagatagaatgcattgcttaaat

SEQ ID NO: 7721 - DNA, 149 bp, Homo sapiens
ctggctagtggcttattacttgtgactggacctctggtcctcaatcgagttcctctacgaagaacacaccagaaatttgtcattgccacttcaaccaaaatcgatatcagcaatgtaaaaatcccaaaacatcttactgatgcttactt

SEQ ID NO: 7722 - DNA, 208 bp, Homo sapiens
  unsure (116): n=A,T,C or G
  unsure (170): n=A,T,C or G
  unsure (200): n=A,T,C or G
  unsure (201): n=A,T,C or G
cacaactgcttacagaatggatcatgtcccccttatgttgaggtgaccacttaattgctttcctgcctccttgaaagaaagaaagaaagaagactgtgtttttgccactgatttanccatgtgaaactcatctcattacccttttctgggtttgaagctgctgtctctanaagtgccatctcaattgtgctttgtatcanncagtgct

SEQ ID NO: 7723 - DNA, 331 bp, Homo sapiens
  unsure (10): n=A,T,C or G
  unsure (11): n=A,T,C or G
  unsure (12): n=A,T,C or G
  unsure (200): n=A,T,C or G
  unsure (288): n=A,T,C or G
ccttgggaannnagaaagacagaatccattgatgtaatggatgcggttggaagtaatattgtggttagcacaagaactggagaagtgatgaggattttgccacgtatgcatgaggacatcaatgaagagtggatctctgataaaaccagatttgcctatgatgggctaaaacgtcaaagacttaccgagccaatggtcanaaatgaaaaagggcttttaacctatacttcttgggaggatgcgctctctcgcagtagctggaatgtttgcagagttttcaaggcaaanatgtggcaccaattgcaggtggcttggtggatgctgaagccct

SEQ ID NO: 7724 - DNA, 232 bp, Homo sapiens
ctgctggttcttctttttggggctctccattactgggctcctgggactggctgtgtggttctgtgtttgtgtgtgtcgctcatgccgtccctctcctggtcccgtctggggagtccagaatcttctgtcggggttccaggtgcttctgggactcggatacccccaacagcaccccagcttcgcctgagcccctccactcctcggccctccttcctccctagttatggccgtg

SEQ ID NO: 7725 - DNA, 205 bp, Homo sapiens
aaaatgaaaaagcaatacattccttgatgcatttgcatgaaggttgttcaactttgtttgaggtagttgtccgtttgagtcatgggcaaatgaaggactttggtcattttggacacttaagtaatgtttggtgtctgtttcttaggagtgactgggggagggaagattattttagctatttatttgtaatattttaaccctttat

SEQ ID NO: 7726 - DNA, 434 bp, Homo sapiens
ctgtgatccatgagaacgcatctcagcccgaggtgctggtccccatccggctggacatggagatcgatgggcagaagctgcgagacgccttcacctggaacatgaatgagaagttgatgacgcctgagatgttttcagaaatcctctgtgacgatctggatttgaacccgctgacgtttgtgccagccatcgcctctgccatcagacagcagatcgagtcctaccccacggacagcatcctggaggaccagtcagaccagcgcgtcatcatcaagctgaacatccatgtgggaaacatttccctggtggaccagtttgagtgggacatgtcagagaaggagaactcaccagagaagtttgccctgaagctgtgctcggagctggggttgggcggggagtttgtcaccaccatcgcatacagcatccggggacag

SEQ ID NO: 7727 - DNA, 383 bp, Homo sapiens
ccacgaacactaccatgatgggaaaaacaaggcaaagaaaccactcgggatcttttagctccaatgaatttgaggaagaattagtgtctccatcgtcatcagaaactgaaggcaactttgtctatcgcacaggtaagtccgtgctttctgtagtaattcctgcgatacctgtttaaagcacaattaaaactgcatcagagggatttattttaacaggtataaagacatcagattattcacatattgcccataattcagttttaaagctttcgttttgtttagaattgccaatggatacatttgttagtagattatggtcttactgagaaattttcagttttcatattaaagacaggaagttttattctttttatattttttaa

SEQ ID NO: 7728 - DNA, 449 bp, Homo sapiens
  unsure (338): n=A,T,C or G
  unsure (339): n=A,T,C or G
  unsure (342): n=A,T,C or G
  unsure (437): n=A,T,C or G
  unsure (445): n=A,T,C or G
ctgctgaagttcaggttggtggtgctgctggtggtgatgttgcattaactgatacaaaaaggcttgatgttgttccttaggcaaaaaacatgtgagagaaaatgagttcccaagcacggaattcagcagtcagatgagctgccttatgttttctttcctttaatattagatatttgcaaagaaagaaaacaagtatctcatctagaaaaatatgctgcactagataataaccatctactataaaatgtcagtatcttcagcaaacagcttattttcaaaacaggacacacataggagagctctattaggttatccgtgatgatcaatcaggaagtgcnncancttaagagaaatcaaggtggacatttgaatgcatcatgcgtggtcaaaccctttcccaacttaaaacaaccttaaagttcccgtttctgcctgtnattagggngctt

SEQ ID NO: 7729 - DNA, 382 bp, Homo sapiens
  unsure (342): n=A,T,C or G
  unsure (376): n=A,T,C or G
catggggacatttgcggaaatttatggattgtatgttactactgtatcgatgttaaatttcttgagtattataccttgtttttaggagatgcatgctaaagaatttatgcataacgaatcccataatgagaatgcaaatgtggctagatgttaaagtttgtgatctagctgggtgcagtggctcatacctgtaatcccagcactttgggaggctggggcaggcagattgcttaaacccaggagtttgagaccagcccaggcaatatggtgaaactccatctctataaaacataaaaaaaattagcttggcatagtagcacgtgcctgtggtcccaccactgnggaggctgaggtgggagaaacgcttgagcttacnaagtcg

SEQ ID NO: 7730 - DNA, 294 bp, Homo sapiens
cctttgaacagcgccgtctggaagctatccaccaggacagtaatcaccaggttgaggaagatgaagtactggatgatgatgtaaattatgaggatgggaatgatgtaccaggcgccctgggcacggctgtccatgtagatgagggaccagtcatccagcgtgagcaaggtgaagagggtgaagatggtggtgaagatgttctggaagcgcttggggtcagatttgcggaacagtgcccggaggaccgcggagaagaggaagaggcaggtaaacatgaggatgaggatggctgcg

SEQ ID NO: 7731 - DNA, 241 bp, Homo sapiens
  unsure (236): n=A,T,C or G
ctgcatcacttcacaagaagaatttgaatcctcactagaaggggtaccatcctcttccagttcatacttcccatatccaacaacatgaacgctgagcattttacttcctggccctctatgggccttgaaccatgtgaccaagtctgattttgagaatgacttcagtgcttcaatctcctgggcaaggcggtcaaagaggtactgctgtgtaaccacttcattccagttcctatccncctcc

SEQ ID NO: 7732 - DNA, 338 bp, Homo sapiens
  unsure (99): n=A,T,C or G
  unsure (102): n=A,T,C or G
  unsure (109): n=A,T,C or G
  unsure (114): n=A,T,C or G
  unsure (117): n=A,T,C or G
  unsure (140): n=A,T,C or G
  unsure (141): n=A,T,C or G
  unsure (148): n=A,T,C or G
  unsure (156): n=A,T,C or G
  unsure (191): n=A,T,C or G
  unsure (193): n=A,T,C or G
  unsure (239): n=A,T,C or G
  unsure (334): n=A,T,C or G
gaaggcggcccgggtcatcatagaaaagtactacacgcgcctgggcaacgacttccacacgaacaagcgcgtgtgcgaggagatcgccattatccccancanaaagctncgcancangatagcaggttatgtcacgcatnngatgaancgaattcngagaggcccagtaagaggtatctccatcaagctgnangaggaggagagagaaaggagagacaattatgttcctgaggtctcanccttggatcaggagattattgaagtagatcctgacactaaggaaatgctgaagcttttggacttcggcagtctgtccaaccttcaggtcactcanccta

SEQ ID NO: 7733 - DNA, 433 bp, Homo sapiens
  unsure (20): n=A,T,C or G
  unsure (370): n=A,T,C or G
  unsure (388): n=A,T,C or G
cctggctcaacaaaagggcnggggattggccctgaaaggagagagctgactgtcctggctgatggacaggagatcctcttagcactaccctaaggcaggcagttgggcattggtgtagacaacaggaaagtccaggctatagccgtactcaaaaacctttctgttccctttctgccagccctagggattgagtccacattcagcacaggactctctgggtacagctctctttaggaagacacaaattgcatggtgaagtcagttatatcctggccgcctttggtccctcccaggaagacgggcatgttttctgcttgagaggtgctgatgtaccagttggggaactgggcagactcaaattccagcttgntattgatttctatcttgntgaagacaaatcgcttttccatcttcttctttgggtaatttttgg

SEQ ID NO: 7734 - DNA, 348 bp, Homo sapiens
  unsure (10): n=A,T,C or G
  unsure (20): n=A,T,C or G
ctgcataccnctgggtacangagagagttcctggaataccaccgccctccaggagctttgcatacctgcgggggcccgggggcattccacctcatcgtgcacctgaaggcgggagatgcagtcaacgtcgtggtgactgggggcaagctggctcacacagactttgatgaaatgtactccacatttagtggggttttcttatatcctttcctttcccacctctaaggtggctggggagatgtcaggggaaagatagatagttgtaaaaactctaaagctttaatatattcggtttgtatgtaatggaagcacggggctagagtttccacataggccccaacataaagg

SEQ ID NO: 7735 - DNA, 471 bp, Homo sapiens; identical to SEQ ID NO: 429
  unsure (9): n=A,T,C or G
  unsure (10): n=A,T,C or G
  unsure (19): n=A,T,C or G
  unsure (20): n=A,T,C or G
  unsure (21): n=A,T,C or G
  unsure (450): n=A,T,C or G
  unsure (458): n=A,T,C or G

SEQ ID NO: 7736 - DNA, 522 bp, Homo sapiens
  unsure (43): n=A,T,C or G
  unsure (103): n=A,T,C or G
  unsure (486): n=A,T,C or G
ccacactctacttctgcttctgccacctatggggtcgaggcangtgtggtgccttggctaagtccacagacttctgagaggcccacgctttcttcttctccanaaataaaccctgaaactcaagcagctttaatcagagggcaggattccacgatagcagcatcagaacagcaagtggcagcgagaattcttgattccaatgatcaggcaacagtaaaccctgtggaatttaatactgaggttgcaacaccaccattttcccttctggagacttctaatgaaacagatttcctgattggcattaatgaagagtcagtggaaggcacggcaatctatttaccaggacctgatcgctgcaaaatgaacccgtgccttaacggaggcacctgttatcctactgaaacttcctacgtatgcacctgtgtgccaggatacagcggagaccagtgtgaacttgattttgatgaatgtcactctaatccctgncgtaatggagccacttgtgttgatggttttaacaca

SEQ ID NO: 7737 - DNA, 450 bp, Homo sapiens
  unsure (18): n=A,T,C or G
  unsure (19): n=A,T,C or G
ccaccggcctgatggaanncgacggcaagcctcgtgccccgcaggcacccctgcactcggtggtacagcaactccatgggaagaacctggtttttagtgacggctacgtggtaaaggagacaattggtgtgggctcctactctgagtgcaagcgctgtgtccacaaggccaccaacatggagtatgctgtcaaggtcattgataagagcaagcgggatccttcagaagagattgagattcttctgcggtacggccagcaccccaacatcatcactctgaaagatgtgtatgatgatggcaaacacgtgtacctggtgacagagctgatgcggggtggggagctgctggacaagatcctgcggcagaagttcttctcagagcgggaggccagctttgtcctgcacaccattggcaaaactgtggagtatctgcactcacagggggttgtgc

SEQ ID NO: 7738 - DNA, 501 bp, Homo sapiens
ctggggtgggcttctcctactccgatgacaagttttatgcaactaatgacactgaggtcgcccagagcaattttgaggcccttcaagatttcttccgcctctttccggagtacaagaacaacaaacttttcctgaccggggagagctatgctggcatctacatccccaccctggccgtgctggtcatgcaggatcccagcatgaaccttcaggggctggctgtgggcaatggactctcctcctatgagcagaatgacaactccctggtctactttgcctactaccatggccttctggggaacaggctttggtcttctctccagacccactgctgctctcaaaacaagtgtaacttctatgacaacaaagacctggaatgcgtgaccaatcttcaggaagtggcccgcatcgtgggcaactctggcctcaacatctacaatctctatgccccgtgtgctggaggggtgcccagccattttaggtatgagaaggacactgttg

SEQ ID NO: 7739 - DNA, 488 bp, Homo sapiens
  unsure (473): n=A,T,C or G
ctgcatcccatgtgcgtcgatgggcaaagtatttgtagcactgcccttggaatttgtgccagccatagtcacatgtctcggtatcttgctcacaaagtgcaccaacataacttggaaggcagaggcacctgaatgtgttaaaaccatcaacacaagtggctccattacgacagggattagagtgacattcatcaaaatcaagttcacactggtctccgctgtatcctggcacacaggtgcatacgtaggaagtttcagtaggataacaggtgcctccgttaaggcacgggttcattttgcagcgatcaggtcctggtaaatagattgccgtgccttccactgactcttcattaatgccaatcaggaaatctgtttcattagaagtctccagaagggaaaatggtggtgttgcaacctcagtattaaattccacagggtttactgttgcctgatcattggaatcaagaattctngctgccacttgctgt

SEQ ID NO: 7740 - DNA, 451 bp, Homo sapiens
  unsure (20): n=A,T,C or G
  unsure (21): n=A,T,C or G
  unsure (29): n=A,T,C or G
  unsure (39): n=A,T,C or G
  unsure (46): n=A,T,C or G
  unsure (285): n=A,T,C or G
cctgtctgactactttgccnncttttgtngcatataggngatgttngctcttgtttttattaatttatatgtatatttttttaatttaacatgaacacccttagaaaatgtgtcctatctatcttccaaatgcaatttgattgactgcccattcaccaaaattatcctgaactcttctgcaaaaatggatattattagaaattagaaaaaaattactaattttacacattagattttattttactattggaatctgatatactgtgtgcttgttttataaaattntgcttttaattaaataaaagctggaagcaaagtataaccatatgatactatcatactactgaaacagatttcatacctcagaatgtaaaagaacttactgattattttcttcatccaacttatgtttttaaatgaggattattgatagtactcttggtttttatac

SEQ ID NO: 7741 - DNA, 490 bp, Homo sapiens
  unsure (20): n=A,T,C or G
  unsure (431): n=A,T,C or G
  unsure (451): n=A,T,C or G
cctgatagatctgggcatangagcttcaggaataaaatgcatgtgaatgcggtgtttcccagggagaattaaccgcattctcgccttcaaatctgaatacctgagagtcataaccagcccagtagggtagactatgaaatgtatagcaaaattttcaaaaccagctcctcctaccagacaagaaaattaacattttttagggcacagaactgaaagcatttttactgaaatctaatccaggatgaaacctaacagttaaacattcttttccttctctgcttctttggctctctatcccagcacaccttgtcccaggctaacttgagtaaacatacacatgtgaccacatgagggcgggaagaacaccaagtgggggtggtgaaattctgaatggaatgcagccccagctagttagggggccccgggctganacctctggcactggcagtanacttatacaggcaaagaagccaaaacaatgagctcatgg

SEQ ID NO: 7742 - DNA, 230 bp, Homo sapiens
gcgccgacaggatgggcaagtgtcgtggacttcgtactgctaggaagctccgtagtcaccgacgagaccagaagtggcatgataaacagtataagaaagctcatttgggcacagccctaaaggccaacccttttggaggtgcttctcatgcaaaaggaatcgtgctggaaaaagtaggagttgaagccaaacagccaaattctgccattaggaagtgtgtaagggtccag

SEQ ID NO: 7743 - DNA, 345 bp, Homo sapiens
  unsure (20): n=A,T,C or G
ctgtagagtgggcttatcanctttcaacacgcaggacaggtacagattcttttccttgaggcccaaggccacaggtattttgtcattactttcttctccttgtacaaaggacatggagaacaccacttgttgctccatatcctgtccctggaggtggagagctttcagttcatatggaccagacatcaccaagcttttttgctgtgagtcccggagcgtgcagttcagtgatcgtacaggtgcatcgtgcacataagcctcgttatcccatgtgtcgaagaagataggttcttcttcaaagatgaagggaaagaaggtgctcaggtcattctcctggaaggtctg

SEQ ID NO: 7744 - DNA, 413 bp, Homo sapiens
  unsure (10): n=A,T,C or G
  unsure (20): n=A,T,C or G
ccactgtggncttagggggngccctccccgaggcctggtgtggtggctcacgcctgtagccccagctattgcaccactgctctccaagctgggcaatggagtcagattctctttcttaaaaaaccacaaaaaagctggatttccagttctctaatattcttagtaccacaagatatgtcataggtatctttaaatgaaattcttagctggaaaagtgactaaaaagtttttctcctgctacctagtaataaacaaatcattgtttattactggtcacttagaaaattaaaagggatagggccaggcacagtggcttatgcctgtaattgcagcacttttagaggccgaggcaggcggatcacctgaggtcgggaagtggatcgcctgaggtcaggagttcgagaccagcctgg

SEQ ID NO: 7745 - DNA, 457 bp, Homo sapiens
  unsure (278): n=A,T,C or G
ctgggaattgctctattgtacaaatacagttttgtacaaaaaaatcacaaaatgttacaaaataaaaaaagtacaaactgcattacttaataaatatgactaaaagtagttaaagtggcaatgagattgattttaagttggaaacattgtttgacccagcaaaccatacaagctctgtttacagacatttctacatcaatacagggcaatcctattttgccttttgaaagaatgtaaagaaatattaagacagtgttctcctgctataactgccaagnttggctccagacatttatgccattagtttataaatctcttagctggattcaagaagttatataaagcaggaggcttatcttgtcacagagttttataccatgttaacattctcttacaacaacgtgacaaatgtaaataaaaacaactgagagcaccagacaatctactctacacatca

SEQ ID NO: 7746 - DNA, 240 bp, Homo sapiens
cctggatcttctttactggggcctgcccctcggggtacagtgcattaatgagcccacatagcaccgtgccatccttgagccagttctggaagttctcgcgtccaggctggggccggcccacatcctttcggcactgggtggtgatccactggatcaggatctgctccagatctgcatcatattgtttctcaatcttctgctgcacctcccggctcaggccatatgcaggtcccctgttgg

SEQ ID NO: 7747 - DNA, 294 bp, Homo sapiens
  unsure (17): n=A,T,C or G
cgagctggatccagagntgcatacagaccaatttctgcatcagtgttatctcgaccagaggctagtgggactggagagggctctacggtatttaatggggcccagaatggtgtgtctcagctaatccaaagggagtttcagaccagtgcaatcagcagagacattgatactgctgccaaatttattggtgcaggtgctgcaacagtaggagtggctggttctggtgctggtattggaacagtctttggcagccttatcattggttatgccagaaacccttcgctgaagcagcag

SEQ ID NO: 7748 - DNA, 607 bp, Homo sapiens
  unsure (586): n=A,T,C or G
tcgacatcagtgacagtgatatgatgctgaacatcatcaacagctctattactaccaaagccatcagtcggtggtcatctttggcttgcaacattgccctggatgctgtcaagatggtacagtttgaggagaatggtcggaaagagattgacataaaaaaatatgcaagagtggaaaagatacctggaggcatcattgaagactcctgtgtcttgcgtggagtcatgattaacaaggatgtgacccatccacgtatgcggcgctatatcaagaaccctcgcattgtgctgctggattcttctctggaatacaagaaaggagaaagccagactgacattgagattacacgagaggaggacttcacccgaattctccagatggaggaagagtacatccagcagctctgtgaggacattatccaactgaagcccgatgtggtcatcactgaaaagggcatctcagatttagctcagcactaccttatgcgggccaatatcacagccatccgcagagtccggaagacagacaataatcgcattgctagagcctgtggggcccggatagtcagccgaccagaggaactganagaagatgatgttggaacagg

SEQ ID NO: 7749 - DNA, 90 bp, Homo sapiens
  unsure (31): n=A,T,C or G
  unsure (79): n=A,T,C or G
ctcctttatttctaagtggaaaaagtattanccaccatcttacctcacagtgatgttgtgaggacatgtggaagcactntaagttttttc

SEQ ID NO: 7750 - DNA, 395 bp, Homo sapiens; identical to SEQ ID NO: 430
  unsure (8): n=A,T,C or G
  unsure (9): n=A,T,C or G
  unsure (18): n=A,T,C or G
  unsure (19): n=A,T,C or G

SEQ ID NO: 7751 - DNA, 382 bp, Homo sapiens
  unsure (9): n=A,T,C or G
  unsure (19): n=A,T,C or G
  unsure (297): n=A,T,C or G
  unsure (300): n=A,T,C or G
  unsure (311): n=A,T,C or G
ccaacaggnggcagaagangaattcctgccttcctcaagaggaacacctaccccttggctaatgctggggtcggattttgatttatatttatcttttggatgtcagtcatacagtctgattttgtggtttgctagtgtttgaatttaagtcttaagtgactattatagaaatgtattaagaggctttatttgtagaattcactttaattacatttaatgagtttttgttttgagttccttaaaattccttaaagtttttagcttctcattacaaattccttaacctttttttggcantanatagtcaaagncaaatcatttctaatgttttaaaaatgtgctggtcattttctttgaaattgacttaactattttcctttga

SEQ ID NO: 7752 - DNA, 406 bp, Homo sapiens
  unsure (24): n=A,T,C or G
  unsure (385): n=A,T,C or G
gtttcataagaattctgttgatangaaatacactgttatcttcacttttataagaaataggaaatattttaatgtttcttggggaatatgttagagaatttccttactcttgattgtgggatactatttaattatttcactttagaaagctgagtgtttcacaccttatctatgtagaatatatttccttattcagaatttctaaaagtttaagttctatgagggctaatatcttatcttcctataattttagacattctttatctttttagtatggcaaactgtcatcatttacttttaaactttgattttatatgctatttattaagtattttattaggagtaccataattctggtagctaaatatatatttttagatagatnaagaagctagaaaacaggcaa

SEQ ID NO: 7753 - DNA, 550 bp, Homo sapiens
gacggctctagctaggtgagcggctccggccagttcccttttagactatggcgacatacctggagttcatccagcagaatgaagaatgggatggtgtgcgttttagttggaacgtgtggccttccagccggctggaggctacaagaatggttgtacccctggcttgtctccttactcctttgaaagaacgtccagacctacctcctgtacaatatgaacctgtgctttgcagcaggccaacttgtaaagctgttctcaacccactttgtcaggttgattatcgagcaaaactttgggcctgtaatttctgttttcaaagaaatcagtttcctccagcttatggaggcatatctgaggtgaatcaacctgccgaattgatgccccagttttctacaattgagtacgtgatacagcgaggtgctcagtcccctctgatctttctctatgtggttgacacatgcctggaggaagacgaccttcaagcactcaaagagtccctgcagatgtccctgagtcttcttcctccagatgctctggtgggtctgatcac

SEQ ID NO: 7754 - DNA, 598 bp, Homo sapiens
  unsure (574): n=A,T,C or G
ggcttgcacagggtgaaagctttgcttctctgctgctgtaacagggactagcacagacacacggatgagtggggtcatttccagatattaggtcacagcagaagcagccaaaatggatccccagtgcactatgggactgagtaacattctctttgtgatggccttcctgctctctggtgctgctcctctgaagattcaagcttatttcaatgagactgcagacctgccatgccaatttgcaaactctcaaaaccaaagcctgagtgagctagtagtattttggcaggaccaggaaaacttggttctgaatgaggtatacttaggcaaagagaaatttgacagtgttcattccaagtatatgggccgcacaagttttgattcggacagttggaccctgagacttcacaatcttcagatcaaggacaagggcttgtatcaatgtatcatccatcacaaaaagcccacaggaatgattcgtatccaccagatgaattctgaactgtcagtgcttgctaacttcagtcaacctgaaatagtaccaatttctaatataacagaaaatgtgtacataaantttgacctgctcatctatacacgg

SEQ ID NO: 7755 - DNA, 387 bp, Homo sapiens
  unsure (19): n=A,T,C or G
ccactgtgtagcaccttcnaattcaatttcatcggcagttgtaataacagttccagcctcaggtgttttaatggtgggaaacatcttgattgcttctccagaaacttgaccatcggttttgttttggaaatcttggagaatctcagttccttccacagcaataagttctgtgggagaagcttccatttcttctaataactcaggtttaccatcatcttctgaaggttctaattttgtgtcaggagataaagagggaggctcagttatgtgaaggtattcctcacttgatggtttgaaagtcgcttcaatatttacatgaatttccttaaaagaatcctgtggggacattacagatgagccgacgtctattcctggcagagcactggg

SEQ ID NO: 7756 - DNA, 477 bp, Homo sapiens
  unsure (288): n=A,T,C or G
  unsure (291): n=A,T,C or G
  unsure (305): n=A,T,C or G
  unsure (328): n=A,T,C or G
  unsure (342): n=A,T,C or G
  unsure (369): n=A,T,C or G
  unsure (378): n=A,T,C or G
  unsure (381): n=A,T,C or G
  unsure (445): n=A,T,C or G
  unsure (455): n=A,T,C or G
  unsure (457): n=A,T,C or G
ccttttcctgtctgcctttcttctgcttgggctcttcaaggcactgggctgggctgctgtctacctgtccacctgcaaggattcaaagaagaaagcagagtgagggcactcactgccatcctgtggaagccaccatcatctctggcccaagcttctgtagtagctccctaaaataataccctatcatctgctcctaatccctccaatctctctccactgagtggctggaatgcttttttttttttctttcacttatataagggataatttttcttttttttttttttnganacggagtctcactnttccgcccaggctgcagtgcagnggcatgatcttggnttactgcaacctccgcctcctgggttnaagcaattntgnggcttcagcctccggagtagctgggattacaggcacatgccaccacacccagggaatttttgtntttttagtananacggggtttcaccatgttgg

SEQ ID NO: 7757 - DNA, 410 bp, Homo sapiens
cctactatgggtgttaaattttttactctctctacaaggttttttcctagtgtccaaagagctgttcctctttggactaacagttaaatttacaaggggatttagagggttctgtgggcaaatttaaagttgaactaagattctatcttggacaaccagctatcaccaggctcggtaggtttgtcgcctctacctataaatcttcccactattttgctacatagacgggtgtgctcttttagctgttcttaggtagctcgtctggtttcgggggtcttagctttggctctccttgcaaagttatttctagttaattcattatgcagaaggtataggggttagtccttgctatattatgcttggttataatttttcatctttcccttgcggtactatatctattgcgccag

SEQ ID NO: 7758 - DNA, 484 bp, Homo sapiens
ttataatgtacattctgacaataaactctccgagatgcttagcctctttgaaaagggactgaagaatgttaagaatgaatatgaacagttaaattatgcaaaacaactgaaagagagattggaggcttttacaagagattttcttcctcacatgaaagaggaagaggaggtttttcagcccatgttaatggaatattttacctatgaagagcttaaggatattaaaaagaaagtgattgcacaacactgctctcagaaggatactgcagaactccttagaggtcttagcctatggaatcatgctgaagagcgacagaagttttttaaatattccgtggatgaaaagtcagataaagaagcagaagtgtcagaacactccacaggtataacccatcttcctcctgaggtaatgctgtcaattttcagctatcttaatcctcaagagttatgtcgatgcagtcaagtaagcatgaaatggtctcag

SEQ ID NO: 7759 - DNA, 445 bp, Homo sapiens
  unsure (11): n=A,T,C or G
gaggagagaantcagactttgttttttgaaatcgattgggatcgaaagcctgaaataaatattcatactttccatagaactgagcacttggttgctatttattttaaaggcagggttatttccccccagggagtggggcaagcggggaagttgggatgagtgcgtgtgggagcaaagagttaaaaatcactatgctaagtttggttgatgctactggggggaaaaagttgaaactactggtgaccactgttgggagaggaaacatctgttttatagatttagcatggccttcccatcaaaaatacactcgtaccatgacgttttgtttttgttttttaagtagccacttttaattactcagtattaatcctaggtgcatgtgttaagatttcggttttcatcgagctgcttatactgatagtgaaaaacttggatgtgtgtgaga

SEQ ID NO: 7760 - DNA, 347 bp, Homo sapiens
  unsure (9): n=A,T,C or G
  unsure (19): n=A,T,C or G
  unsure (20): n=A,T,C or G
  unsure (115): n=A,T,C or G
  unsure (190): n=A,T,C or G
  unsure (220): n=A,T,C or G
  unsure (275): n=A,T,C or G
  unsure (300): n=A,T,C or G
  unsure (312): n=A,T,C or G
  unsure (313): n=A,T,C or G
  unsure (343): n=A,T,C or G
  unsure (346): n=A,T,C or G
ctgtcctcngttactcacnnacagttccaaaactaagcgattatataagcacatccatattttagggctactctaagttaaaaaccttttctcttgtttcagagttatttacatnaaattaagacatttacaaattgttcatagtatacaatagcccaaatatgattttcacctatgctgtgtaaagaanttaagcattcgtaagtttgtctaataaatncagtgcacttttttccataacacgagctattctaaatgttttacatttctttcantgcatatttccaaattcattaaacngaatgaaatcanngttattaaatggctatatcataatattcangcnt

SEQ ID NO: 7761 - DNA, 392 bp, Homo sapiens
  unsure (21): n=A,T,C or G
ctggcagatgcagaagaagcnatgtatcagaatgtggatggccgtgtttcggaatgtcctcacacctaccaaaacaggcgacctttcagcagagagatggatttggggctactctctccgcaggctcaggtcgaagattcgtagaggaacaatttagttttaaggacttcatccctccacctatccctaacaggctgtagattaccaaaacaagattaatttcatcactaaaagaaaatctattatcaactgctgcttcaccagacttttctctagaagctgtctgcgtttactcttgttttcaaagggacttttgtaaaatcaaatcatcctgtcacaaggcaggaggagctgataatgaactttattggagcattgatctgcatccaagg

SEQ ID NO: 7762 - DNA, 413 bp, Homo sapiens
  unsure (20): n=A,T,C or G
cccatacccacttcctgatnctttggttctctttcctgctcaggtcccttcatttgtactttggagtttttctcatgtaaatttgtataacagaaaatattgttcagtttggatagaaagcatggagaataaaaaaagatagctgaaattcagattgaagaaatttatttctgtgtaaagttatttaaaaactgtattatataaaaggcaaaaaaagttctatgtacttgatgtgaatatgcgaatactgctataataaagattgactgcatggagaagtcttcatcaagactatttttctaacacgattacattcagtaacaaaagtagtcagcagttttaacagtttttctagacaatggagagactgagaaatgtacattttgtttcatacataatgttggttactgctt

SEQ ID NO: 7763 - DNA, 544 bp, Homo sapiens
  unsure (488): n=A,T,C or G
  unsure (505): n=A,T,C or G
ctgcatcccatgtgcgtcgatgggcaaagtatttgtagcactgcccttggaatttgtgccagccatagtcacatgtctcggtatcttgctcacaaagtgcaccaacataacttggaaggcagaggcacctgaatgtgttaaaaccatcaacacaagtggctccattacgacagggattagagtgacattcatcaaaatcaagttcacactggtctccgctgtatcctggcacacaggtgcatacgtaggaagtttcagtaggataacaggtgcctccgttaaggcacgggttcattttgcagcgatcaggtcctggtaaatagattgccgtgccttccactgactcttcattaatgccaatcaggaaatctgtttcattagaagtctccagaagggaaaatggtggtgttgcaacctcagtattaaattccacagggtttactgttgcctgatcattggaatcaagaattctcgctgccacttgctgntctgatgctgctatcgnggaatcctgccctctgattaaagctgcttgagtttcagg

SEQ ID NO: 7764 - DNA, 449 bp, Homo sapiens
  unsure (9): n=A,T,C or G
  unsure (10): n=A,T,C or G
  unsure (20): n=A,T,C or G
  unsure (82): n=A,T,C or G
  unsure (114): n=A,T,C or G
  unsure (146): n=A,T,C or G
  unsure (178): n=A,T,C or G
cctggctcnncaaaagggcnggggattggccctgaaaggagagagctgactgtcctggctgatggacaggagatcctcttancactaccctaaggcaggcagttgggcattggngtagacaacaggaaagtccaggctatagccgnactcaaaaacctttctgttccctttctgccanccctagggattgagtccacattcagcacaggactctctgggtacagctctctttaggaagacacaaattgcatggtgaagtcagttatatcctggccgcctttggtccctcccaggaagacgggcatgttttctgcttgagaggtgctgatgtgccagttggggaactgggcagactcaaattccagcttgttattgatttctatcttgttgaagacaaatcgcttttccatcttcttctttgggtaatttttgggatctacactctccag

SEQ ID NO: 7765 - DNA, 592 bp, Homo sapiens
  unsure (568): n=A,T,C or G
ccagtggaatgatgttccctgcaattaccatctcacctatacgtgcaagaaaggaacagttgcttgcggccagccccctgttgtagaaaatgccaagacctttggaaagatgaaacctcgttatgaaatcaactccctgattagataccactgcaaagatggtttcattcaacgtcaccttccaactatccggtgcttaggaaatggaagatgggctatacctaaaattacctgcatgaacccatctgcataccaaaggacttattctatgaaatactttaaaaattcctcatcagcaaaggacaattcaataaatacatccaaacatgatcatcgttggagccggaggtggcaggagtcgaggcgctgatccctaaaatggcgaacatgtgttttcatcatttcagccaaagtcctaacttcctgtgcctttcctatcacctcgagaagtaattatcagttggtttggatttttggaccaccgttcagtcattttgggttgccgtgctcccaaaacattttaaatgaaagtattggcattcaaaaagacagcagacaaaatgaaagnaaaatgagagcagaaagtaagcat

SEQ ID NO: 7766 - DNA, 443 bp, Homo sapiens
  unsure (288): n=A,T,C or G
  unsure (311): n=A,T,C or G
  unsure (347): n=A,T,C or G
  unsure (349): n=A,T,C or G
  unsure (356): n=A,T,C or G
  unsure (397): n=A,T,C or G
  unsure (412): n=A,T,C or G
  unsure (424): n=A,T,C or G
  unsure (439): n=A,T,C or G
ctgggccgcttgacacctcgtagcagccgtctcattctctcgtcttgctgcgtcctgtctgtggagtcctcagtcactctgctgttggagagtgctggaggaaatgcacttttactgtgctgcactttttatagagctgcattgtcggtgattccaatttaaaaatccatattcaaaaataccctcacacatccctgcatcagtgattctaatgatcagctttgactggacctcagctcacacgaatctccaaggaaaaactctacagagcatcttttagagcaaganattcatacaggccaagtgatganagggggagtcaccaaggcttcagccccaagggcatntncagcctnaggccggcaggtcctatgtccttgacacaaacgcttcttgntgaaatcctccctantgatgctgcgantgctgttggtcccanttct

SEQ ID NO: 7767 - DNA, 451 bp, Homo sapiens; identical to SEQ ID NO: 274
  unsure (2): n=A,T,C or G
  unsure (11): n=A,T,C or G
  unsure (12): n=A,T,C or G
  unsure (13): n=A,T,C or G
  unsure (189): n=A,T,C or G
  unsure (199): n=A,T,C or G
  unsure (209): n=A,T,C or G
  unsure (215): n=A,T,C or G
  unsure (385): n=A,T,C or G
  unsure (419): n=A,T,C or G
  unsure (442): n=A,T,C or G

SEQ ID NO: 7768 - DNA, 478 bp, Homo sapiens
  unsure (19): n=A,T,C or G
ctgaaaaaccaagaacagnttttagtgactatttacatccacagtataaggcacctacagaaaaccatcataatagaggccctactatgcaaaatgatggaaggaaagaaaagccagttcactttaaagaattcagaaaaaatacaaattcaaagaaatgcagtcctgggcatgattgtagagaaaattctcattctttcagaaaggcttgttctggtgtatttgattgtgctcaacaagagtccatgagcctttttaacacagtggtgaatcctataaggatggatgaatttagacagataattcaaaggtacatgttaaaagaactggatactttttgtcactggaacgaacttgatcagttcatcaataagtttttcctaaacggtgtctttatacatgatcagaagctcttcactgactttgttaatgatgttaaagattatcttagaaacatgaaggaatatgaagtagataa

SEQ ID NO: 7769 - DNA, 341 bp, Homo sapiens
  unsure (10): n=A,T,C or G
gctgaaattnagcattttaaatagtacagtaggctggtatacattaggaaatggactgcactggaggcaaatagaaaactaaagaaattagataggctggaaatgcttactttctgctctcattttctttcattttgtctgctgtctttttgaatgccaatactttcatttaaaatgttttgggagcacggcaacccaaaatgactgaacggtggtccaaaaatccaaaccaactgataattacttctcgaggtgataggaaaggcacaggaagttaggactttggctgaaatgatgaaaacacatgttcgccattttagggatcagcgcctcgactcctg

SEQ ID NO: 7770 - DNA, 437 bp, Homo sapiens
cctgaagtcttctcctccatgaacatcatggactgagctgggggaagaagggatatctactgtggtctgggcaccacctctgtgggcactggtgggccattagatttggaggctacctcacctgggcagggatgatggcagagccaggctgttggaaaatccagaactcaaatgagccccttcatccgcctgtgggcgcatactacagtaactgtgactgatgactttatcctgagtcccttaatcttatggggccggaaggaatgtcagggccaggtgcagaccttgggggaagactttaaaccacctagttctccccgatggggcatcggtctaaagctttgggggagtgggcgcagtggctcacacctgtaatcccagcactttgggaggccgaggtgggcagatcatgggtcaagagatcgagaccatcctgg

SEQ ID NO: 7771 - DNA, 303 bp, Homo sapiens; identical to SEQ ID NO: 431
  unsure (152): n=A,T,C or G
  unsure (295): n=A,T,C or G

SEQ ID NO: 7772 - DNA, 513 bp, Homo sapiens
  unsure (19): n=A,T,C or G
  unsure (20): n=A,T,C or G
  unsure (216): n=A,T,C or G
ccaacatactgaaaccccnnccttactaaaagtacaaaaattagccaatgtggtgatgcatgcctgtaatcccacctactcgggacactgaggcaggagaatcgcttgaaccagggtggcggatgttgcaatgagccgagatcatgccactgcactccagcctgggcgacacagcaagactctgtctcaaaaaaaaaaaaaaaaaaaaaaaaattntgagacaaattaaacacccaacaattgagagaaaaaaatattctgttttttgaaaaaatttgtatagaacattgccttctattctataacaagtcctcagttgagcatttagagtatgtttaatgaaagcatgcagaggggaataaaacctgttcatcatctaaattaatcccctttatgtatccaatgtactttctatttgacacacaaaagtatgagtgattaggaaaatactaattgagctgaatgacataaattgtattaagtggatgatcacaaattcagatgctatatacg

SEQ ID NO: 7773 - DNA, 579 bp, Homo sapiens
  unsure (573): n=A,T,C or G
ctgataccacacattgaaaggtaaacattaatatttcaaatctgatgtctaactaaaaatgtacagaatgaaaactagaaaatttcaaccccagattatcttcaaccttgctccctccaccaatcatactttgacatttatctatttccttctccacttatggatgtaattggcttgctatagaaactacagttcagatgctttgaatgtatgaactacaatgaacaataaagtcctcttcttttgaagcatattttggcttcagctttaagataatcttatgacaagaagggtcacactgattcacttaataaattccattcttacctaacacaaggtttagttgataagcacttggacaaaaataatacttttcaaaaatgtaaagcaaactagtgaggacaaaggattttgtcctcatctcaacaatgatcagctattggaactgcatgaaactgaacaatttaaacctggagctggtaatgttcttaagaccaattcagaacaaaggcaggttgcccttaaaacaggtttgaccttttccttcactcttcctcctgtcccaccctctgngagtga

SEQ ID NO: 7774 - DNA, 458 bp, Homo sapiens
  unsure (10): n=A,T,C or G
  unsure (11): n=A,T,C or G
  unsure (170): n=A,T,C or G
  unsure (172): n=A,T,C or G
  unsure (183): n=A,T,C or G
  unsure (194): n=A,T,C or G
  unsure (230): n=A,T,C or G
ccttagtcanncttagctccctgtatcttctcactctgacccactgcgcgttccttcaagcagagagctgcctcccatggctacctcctcaatataaacttgctaactaatctcttagcaaacacttgaagaaaacctgaagagtggaaagagaggcagagggggaacananacccagcgtanataaagctcangacacattcaacgggacgctggaatctaaatttagnaccaaacttaagatttctttagataggcgagctgttgcctctggaacagggattttcataacaattattttgtttttaagtctcaatcttaattcttctgctatctcttaaatagggctcactttaacataaactcccttgatttttttttctctcagtggtgatgtgcctacccttataggtattcttataggctttcttttattactgaatatctctttaataatt

SEQ ID NO: 7775 - DNA, 422 bp, Homo sapiens
  unsure (9): n=A,T,C or G
  unsure (10): n=A,T,C or G
  unsure (11): n=A,T,C or G
gttggggcnnnccttggttttatacattttagggagacataagacattaatcaatatatgtaagaagaacattggttcagtggggagggagcttccaggtcacagataggtgagacacaaacagttgcattcttttgagtttctgattagcctttccaaaggaggcaatcagatatgtatctatctcagtgagcagagagataactttgaatagagtgggaggtgggtttgccctaagaagtttccctaagcttgagttttccttagtgattctggggccccaagatattttcctgtcacagttgacatccccaacacagtgtttagggctcagaaaaagataccctaaaatagggtgctttggcatgctgaatgctttgaataaaggaggctgaagggcctcagaaataagagaacaaagg

SEQ ID NO: 7776 - DNA, 554 bp, Homo sapiens
  unsure (550): n=A,T,C or G
cctaggggccgcaagacggctaatttattataatttctccttttttagtacatgcacagaaagcctgacagccaagtgtacatgaacatacacacacacacacacacacacacacagaggccaatttccagtgaggaacaggctccacagaagaagctgataggcaggggggatcaaacgctgctcccctgctcaccgatctacttctccaaatacaatatcttgggtacctatgatggcaacgacatctgccaacatgtgtcccttagacatcttgtccaaaccagccagatgggcaaaaccaggagccttgatcttgcatcgataagggcggctgctgccatcagacaccaggtacaccccaaactctcccttgggagcctcaatggcagtatatgtggctcctggaggaacttggtagccctcagtatacaacttaaagtgatgaatcagtgactccatggaagtcttcatctctgctcgcttaggtggagacactttggcatcatcaaccttgatctccccaggaggcatcttgtttagacactgngcga

SEQ ID NO: 7777 - DNA, 474 bp, Homo sapiens
  unsure (10): n=A,T,C or G
  unsure (19): n=A,T,C or G
  unsure (20): n=A,T,C or G
cctgctcacnggtgaatcnnttctctgggtccttctccatcaagtgccggatgaaatctttggcagagtcagagatgtcgtcccagtaaggagagtcaaactcgtactcggccttcaaaatctgttcaaagagtttggcatcattctcgtcatagaagggagggtaaccgcagagcaagatgtaggcgatgacacctatggaccagcaatccacagccttgctgtagggcttctgggccaggacttcaggggccacgtatcccggagttccacaggcggtggagagcacactgcccgggtcctccatcttggagaggccaaagtcggagatcatgattttggagtcttcatccaggctgtagtacagcagattctctggcttgagatcccggtgtacaatgcccaggtcatgcaggtatttcacagcatccagcacctggaagatgaggcggctggcgtcccgctccgtgtaga

SEQ ID NO: 7778 - DNA, 518 bp, Homo sapiens
  unsure (19): n=A,T,C or G
  unsure (488): n=A,T,C or G
  unsure (495): n=A,T,C or G
ccacttttttttttctgcnaacctcaaatgaaacagaatctcacagatgtggggtccccctcctaattgtaataaacgttagagaaatgctccagaaaggaacaaagggagaccctctcagatcagcctaaaaccagagtggaatagggctcctctgggcggtttaagggcacagaaaggaccctcagctactcctggcctccccgggtctctttcccagaagacacaactttccaggctgccaaaagtaatagaagtcaaaaccctcaaaaccaccactgctctcgggaagtttttgagtaggatgaggaagaaagaagagagccctccttcattttgttacacgatctcaaggccaagagcaagtagaagatgtctaaagagaacaaaagaggtttcttcctggtactgtactacagatcagcaacagtttcacagggaggcgttggctcaggttctggtacatttgaagataactgaaggccaangacttanccaaggaaggacaccagcagaac

SEQ ID NO: 7779 - DNA, 518 bp, Homo sapiens
  unsure (492): n=A,T,C or G
  unsure (502): n=A,T,C or G
ctggcctgtcctgtcgggtgaagcacagcagtctagagggccaggacatcgtcctctactggggtgggagctacacctccatgggcttgattgccttggcagtcctggcgtgcttgctgttcctcctcattgtgggctttacctcccggtttaagaggcaaacttcctatcagggcgtcctgtgactcgccttgccacatctgtgtctctggaacccaggacctctggacctcaggttcccaagacttcagtcctggtctgctcaggaattgaagatgtaaggaattgaagataggagagataccttgaaaaagtagagaacagtcatgaggcagctttcatcacacccttttaacatttatctaaaagaatttaaattctttttcaaaaattacactacaagtttataagcccaaatggctctgtgaaatcagaagtgcaaaggtgtgcaaacttgtatctgaagacctaccagggacaagcaggtaaganctgatgtgantgtgtgtgatgggatc

SEQ ID NO: 7780 - DNA, 564 bp, Homo sapiens
  unsure (555): n=A,T,C or G
cctcagaacagtcaagaaagttttgtcacttggactcgaccttaatagcagttttcatctgtcaggtgtgtcaatgatgccattttctttcaatgaatcaaagcaggcgattactcgtccattttcaacttggcagcttttcgaaggatgtgcaaatttacattccgtgtctggccgtgagcaagtccccctctggaactctctacatacttccagtgttagccattttgtgtcccgaattggtgtgacactaacagccatgtttagattttacaggtagttaaatgtttcagtgaaaccaacaaacccaacccccccaaaaaagagcaacaaccaaaaaaaaaaagctgaactgatgatgaaaatgtcccctcaaaatacttttccccactccctgctttaaaagtacatggaaaattgtgtcgtcaatatcaaggaaaagatctcccactagaaattcacagcatgaaactgttaattcaaagaggttttggtttttagagaaatactaggattgtaagtagatgaacgtttaaaagtagggcctggtatcanccttgtgct

SEQ ID NO: 7781 - DNA, 195 bp, Homo sapiens
  unsure (36): n=A,T,C or G
  unsure (96): n=A,T,C or G
  unsure (148): n=A,T,C or G
  unsure (152): n=A,T,C or G
  unsure (166): n=A,T,C or G
  unsure (169): n=A,T,C or G
  unsure (171): n=A,T,C or G
cggagtttcgctctgtggcccaggctggaatgcagnggcgcaatctcggctcactgcaagctccgcctcccgggttccacaccattctcctgcctnagcctcccgagtagctgggactacaggcgcccaccaccatgcccagctaatntttngtatttttttttancananatagggtttcaccgtgttagccag

SEQ ID NO: 7782 - DNA, 477 bp, Homo sapiens; identical to SEQ ID NO: 432
  unsure (8): n=A,T,C or G
  unsure (9): n=A,T,C or G
  unsure (18): n=A,T,C or G
  unsure (19): n=A,T,C or G
  unsure (25): n=A,T,C or G
  unsure (41): n=A,T,C or G
  unsure (47): n=A,T,C or G
  unsure (85): n=A,T,C or G
  unsure (208): n=A,T,C or G
  unsure (238): n=A,T,C or G
  unsure (286): n=A,T,C or G
  unsure (341): n=A,T,C or G
  unsure (367): n=A,T,C or G
  unsure (390): n=A,T,C or G
  unsure (406): n=A,T,C or G
  unsure (461): n=A,T,C or G
  unsure (465): n=A,T,C or G

SEQ ID NO: 7783 - DNA, 260 bp, Homo sapiens
  unsure (11): n=A,T,C or G
  unsure (12): n=A,T,C or G
gtaagactccnnctcaaaaccaaaccaaaccaaaccaaaaaaagaagtgagttggcactttcaacattctgcctggaaatctccttaccaaacctataagatcattaggtatattttctgcactttgtattgtgacaggtgacagtgttaccaaactttttaccaggacataatagggtctgcctttcttctagttgctaacaatttcccccaagtccatcttgcctgcactaacagtctcctttagacctctcctctcc

SEQ ID NO: 7784 - DNA, 467 bp, Homo sapiens
  unsure (221): n=A,T,C or G
cctggacctgtgtaaaccttcaaacactcttttttacattaggtcatgaagttaaattttttactgtttctgtgctacagactcttcaaaggaaaatagttaagtcaatttcaaagaaaatgaccagcacatttttaaaacattagaaatgatttgactttgactatctactgccaaaaaaaggttaaggaatttgtaatgagaagctaaaaactttaagnaattttaaggaactcaaaacaaaaactcattaaatgtaattaaagtgaattctacaaataaagcctcttaatacatttctataatagtcacttaagacttaaattcaaacactagcaaaccacaaaatcagactgtatgactgacatccaaaagataaatataaatcaaaatccgaccccagcattagccaaggggtaggtgttcctcttgaggaaggcaggaattcctcttctgccacctgttgg

SEQ ID NO: 7785 - DNA, 537 bp, Homo sapiens
  unsure (9): n=A,T,C or G
  unsure (480): n=A,T,C or G
  unsure (521): n=A,T,C or G
ctgctgcancctgctttgcctgcacacaggaaaaagtacacatttggggcagaccttaatgaggacgtataaatatctggcccctgatctgacatatctgaagtgtgatctccactattaccagagttcccctgagggactatgtccatgggactttgtttatctcacatccttacttgctgtccttccctgtgccatttcctcactcatgggaatgctttctagtacatcactgtctcatgaaaccttgtcttagcgtctgcttattgggacagtgatggcaacttaagtcatacgtaattgttaaacctaggattggcaaaactgagaatcactgggcaattttatataaacgcttttccagagaagagtgaaaagaaattcttctagttggtatctctggtagataccataaagtaataaagaaaagctaaaataaaccccagagtctaactcagcatgattctacactttctgtangcttctgtaggcttctagaaattccctggaaagggaattgncaaaatataaaaaaca

SEQ ID NO: 7786 - DNA, 529 bp, Homo sapiens
  unsure (18): n=A,T,C or G
ccacctggagacggtgantttgggcctattgaagacacctgctcagtatgacgcttctgagctaaaagcttccatgaaggggctgggaaccgacgaggactctctcattgagatcatctgctccagaaccaaccaggagctgcaggaaattaacagagtctacaaggaaatgtacaagactgatctggagaaggacattatttcggacacatctggtgacttccgcaagctgatggttgccctggcaaagggtagaagagcagaggatggctctgtcattgattatgaactgattgaccaagatgctcgggatctctatgacgctggagtgaagaggaaaggaactgatgttcccaagtggatcagcatcatgaccgagcggagcgtgccccacctccagaaagtatttgataggtacaagagttacagcccttatgacatgttggaaagcatcaggaaagaggttaaaggagacctggaaaatgctttcctgaacctggttcagtgcattcagaacaagcccctgtat

SEQ ID NO: 7787 - DNA, 368 bp, Homo sapiens
cctttcttgtaagtgaagaaaaaggaatgcagcaaagaagagttcgacattggagtccttagttccatcaggatcccattcgcagcctttagcatcatgtagaagcaaactgcacctatggctgagataggtgcaatgacctacaagattttgtgttttctagctgtccaggaaaagccatcttcagtcttgctgacagtcaaagagcaagtgaaaccatttccagcctaaactacataaaagcagccgaaccaatgattaaagacctctaaggctccataatcatcattaaatatgcccaaactcattgtgactttttattttatatacaggattaaaatcaacattaaatcatcttatttacatgg

SEQ ID NO: 7788 - DNA, 346 bp, Homo sapiens
  unsure (8): n=A,T,C or G
  unsure (17): n=A,T,C or G
  unsure (18): n=A,T,C or G
  unsure (246): n=A,T,C or G
  unsure (253): n=A,T,C or G
  unsure (254): n=A,T,C or G
  unsure (293): n=A,T,C or G
  unsure (319): n=A,T,C or G
ccaagaancagtggccnnattgcatcccaaaccacgcctcttgaccaggctgcctcccttgtggcagcaacggcacagctaattctactcacagtgcttttaagtgaaaatggtcgagaaagaggcaccaggaagccgtcctggcgcctggcagtccgtgggacgggatggttctggctgtttgagattctcaaaggagcgagcatgtcgtggacacacacagactatttttagattttcttttgncttttgnnaccaggaacagcaaatgcaaaaactctttgagagggtangagggtgggaaggaaacaaccatgtnatttcagaagttagtttgtatatatta

SEQ ID NO: 7789 - DNA, 362 bp, Homo sapiens
  unsure (19): n=A,T,C or G
ggcaacgctgaaagtacgngaccgcgtccggaccaagatggagagagacatcctggctgatgtaaatcacccattcgtggtgaagctgcactatgccttccagaccgagggcaagctctatctcattctggacttcctgcgtggtggggacctcttcacccggctctcaaaagaggtgatgttcacggaggaggatgtgaagttttacctggccgagctggctctgggcctggatcacctgcacagcctgggtatcatttacagagacctcaagcctgagaacatccttctggatgaggagggccacatcaaactcactgactttggcctgagcaaagaggccattgaccacgagaagaagg

SEQ ID NO: 7790 - DNA, 272 bp, Homo sapiens
ttgaattacggaataatgagttagaactattaaaacagccaaaactccacagtcaatattagtaatttcttgctggttgaaacttgtttattatgtacaaatagattcttataatattatttaaatgactgcatttttaaatacaaggctttatatttttaactttaagatgtttttatgtgctctccaaattttttttactgtttctgattgtatggaaatataaaagtaaatatgaaacatttaaaatataatttattgccaaaaaaaaa

SEQ ID NO: 7791 - DNA, 541 bp, Homo sapiens
  unsure (499): n=A,T,C or G
  unsure (507): n=A,T,C or G
  unsure (514): n=A,T,C or G
ccaccccaccctaatcttattatgcaaatgagctttggctgacactatgttgcctgctttttactgtacacatggctggcaaagagaagggaacttggagccgccattttggacatgcctagtctaggtagctttttcctattggcacagttgccagcattcacccgtggaagcttccagcttgcttgtctatgtctgcagctcgattttacaggctgttctttgttagaaaagaaaatgattttgggggctgcttttcattaaacagaaaacctcactgaggacttcctacccttgctatttgcctaaatgatttctccttaactcctatatcatcaccatgcttggctaatttttaatttttttttggggtagagatggttctcactctgttgcccacactggtctcaaactcctgggcttgagccatcctcctgcctcaccctcccaaagtgctaggattacagggcatgaactgtgccatacccatcttcgaggntttatggncatgtanaatttctgttcaaggaaagcagataac

SEQ ID NO: 7792 - DNA, 434 bp, Homo sapiens
  unsure (9): n=A,T,C or G
  unsure (18): n=A,T,C or G
  unsure (19): n=A,T,C or G
  unsure (401): n=A,T,C or G
ctggtcacntcatgctgnntagaatgacatctctttcgtctcctattttgttacccaactcttcctatttttgttaccaatcactgtgctctctgccgccccctggctccaggctaatttttctggaatgaattgagaaggtggcgtgctggcctgagctgatggaccacttggtgttttgcgttttggcccatgtttgctgcctctatctggtctgccttgcccgtttgcctgttcctattcagtgtcttttctattttttcctctctcgttcatgccttctgttttgctcttgtccctggagcatatctgcctaattaagatgttgccttttagttgaatgccactgaagagctgtgatagcatgtttcaaagctgaactctacagagcgagtgctganacagtatttagggtttctgggagtgaggctggt

SEQ ID NO: 7793 - DNA, 550 bp, Homo sapiens
cggaagaggagctcttggagacgacattgaaaatgaaattcttatctctggacttacagggagaccccagagagagtcaaccccttctgggcactgtgattgatgggatgctgctgctgaaaacacctgaagagcttcaagctgaaaggaatttccacactgtcccctacatggtcggaattaacaagcaggagtttggctggttgattccaatgcagttgattagctatccactctccgaagggcaactggaccagaagacagccatgtcactcctgtggaagtcctatccccttgtttgcattgctaaggaactgattccagaagccactgagaaatacttaggaggaacagacgacactgtcaaaaagaaagacctgttcctggacttgatagcagatgtgatgtttggtgtcccatctgtgattgtggcccggaaccacagagatgctggagcacccacctacatgtatgagtttcagtaccgtccaagcttctcatcagacatgaaacccaagacggtgataggagaccacggggatgagctctt

SEQ ID NO: 7794 - DNA, 367 bp, Homo sapiens
ccttacccccacaccaccccccagtctcaaagaattgctcatcaaggaggtgctggactaacccttgcctagatttaagccactgtgaggagaggggttgccccagaaggcaggggaaggacctgatgagaacagaatagctgggaggctgcagagggtgctgggagcccctagaagttccaaaagagaatgtgaagcagatcaaggaaacttctgttgagctaggctcagggtgagctttggctggggttgcccttgtgtagtacagggaagtctgacacagcctctccagcctataaacagccgggggactgtggcacaggttggggcaatgttcccttgttggtgggcccccaagctggcaagg

SEQ ID NO: 7795 - DNA, 385 bp, Homo sapiens
  unsure (9): n=A,T,C or G
  unsure (257): n=A,T,C or G
  unsure (260): n=A,T,C or G
  unsure (269): n=A,T,C or G
  unsure (272): n=A,T,C or G
  unsure (274): n=A,T,C or G
  unsure (357): n=A,T,C or G
  unsure (372): n=A,T,C or G
atgcagaanaagcgatgtatcagaatgtggatggccgtgtttcggaatgtcctcacacctaccaaaacaggcgacctttcagcagagagatggatttggggctactctctccgcaggctcaggtcgaagattcgtagaggaacaatttagttttaaggacttcatccctccacctatccctaacaggctgtagattaccaaaacaagattaatttcatcactaaaagaaaatctattatcaactgctgcttcaccanacntttctctanaancngtctgcgtttactcttgttttcaaagggacttttgtaaaatcaaatcatcctgtcacaaggtaggaggagctgataatgaacnttattggagcattgntctgcatccaagg

SEQ ID NO: 7796 - DNA, 564 bp, Homo sapiens
  unsure (514): n=A,T,C or G
  unsure (529): n=A,T,C or G
tggatattgccaatatctggattttatgtatctatcataaaatttgtcacataggagatggtagaagaccatagttaatgtggagtaacgttttatatagctaatctctacttaagaaacctttcattcagagtatgaagaaaatgatttaaaattttgtggaggtccccttatttctgttacagtaatagttttactgtattttgtgaaactctacagtctctttaaaaaaatgattatgttgtttatgataattgttttgatgtcatttttattttcatcaaaatcaatgtgaaatgtattagaaaaaggcatagaaattcataggcgtttcatttacttcctcaactctagatgtctttcagaatacctatattggtgagcatagaacgaatgcgtcggaatgattttcctctacttgaagcctaccttctttaaaaagagcctgacttgagggccaaaattcatactgaggagaggctgacagatcctttgttttgcaggggctccagancttgatatatttctnggaatttggaatatgctaaactagatttctgccct

SEQ ID NO: 7797 - DNA, 317 bp, Homo sapiens
ccagaagcaggtattcaaagcagagaacaatccctgggtgacccccattgcagaccagttccagcttggcgtgtcccatgtttttgagtatatccgttctgagacatacaaatacctctacggcagacacatgcaggccaacccagaaccaccgaagaagaataatgacaaatcgaaaaagatcagccggaaacccctggcagccaagaacagataaggaagggattggcatcggctggccttccagcaccttctctctccaacacttcattctctcttgccctgtctctcaaataaacccaatgctgcgtgtgagg

SEQ ID NO: 7798 - DNA, 472 bp, Homo sapiens
  unsure (19): n=A,T,C or G
  unsure (20): n=A,T,C or G
  unsure (62): n=A,T,C or G
  unsure (443): n=A,T,C or G
attacgggttggaacccannccaatgtaatttcaatcgtgttaagaaagtaatggtgacttnacatgttattgtagttagttacattatagaatattacttatttttcttgttaaaatgtagtttttcatttcctacatttattagattttcattttctattaacaattgaataccatttcagtttatagacttgttttattagattttaccaatgaatttttcaaaatacaaagaaaagtagtttttccttcataacatactcagttttgaattacatgtagtgtcacatgaatattcgtattgttaactaaatgatttatattttactgatttaatattacagtgtaagaatgtcagtcattgttagttcttgtctagttttcattaaaagaacaaagatcttttatatggatatcttataaatatataatcattgctaantaagaagttaagttgttgctatcgcaaca

SEQ ID NO: 7799 - DNA, 573 bp, Homo sapiens
tcgaccagcattatccttgcaggaaaccagaaaagcaaaatcttcatcaccaaaaaaacagaatgatgtccgagtcaaatttgaacatagaggagaaaaaagaatccttcagttccccagaccagttaaactggaagatctgagatctaaagctaaaattgcctttggacagtctatggatctacattataccaataacgagttggtaattccattaactactcaagatgacttggacaaagctgtggaactgctggatcgtagtattcatatgaagagcctcaagatattacttgtaataaatggaagtacacaggctactaatttagaaccattgccatcactagaagatttggataatacagtatttggagcagagaggaaaaaacggctatctataataggtcctactagtagagatagaagttctcctcccccaggttacattccagatgaattacaccaggttgcccggaatgggtcattcactagtatcaacagtgaaggagagttcattccagagagcatggaccaaatgctggatccattatctttaagcagccctgaaaattc

SEQ ID NO: 7800 - DNA, 558 bp, Homo sapiens
  unsure (9): n=A,T,C or G
  unsure (10): n=A,T,C or G
  unsure (19): n=A,T,C or G
  unsure (182): n=A,T,C or G
  unsure (305): n=A,T,C or G
  unsure (321): n=A,T,C or G
  unsure (412): n=A,T,C or G
  unsure (492): n=A,T,C or G
  unsure (541): n=A,T,C or G
  unsure (555): n=A,T,C or G
cctcacgcnnaaactagtncagttcatgaaaacccgagatactctgccagcttcttgaggaagcagtgttgtcacacttttctgagcttcagtgattcacacattttgataagacagcatgttctgtgggttaagtacatttaccttttcaaaatatactcccatgaagtatcatggttcanaattacacacttacaaagttaaatggcataaaactactttgtaaaaagtgcctacactctaaaaggtgatttaaaggtttatgacatcttaattcaagtgaatactgaatcagtaggattatngagcaggtgctctaanttagggaatctggagtcagtctctcctttgcttatgtgcaatgtggacccagggatttctcaatttctctgtcagaatttttaacatggtnaaatggctattattatatggaatgatatttcctaagctctgacacatactctttctccaaatcacagggtttatgaaacnaagatacacacacacacacacacaccacacacacacacacacacatatntgtatacacacatntat

SEQ ID NO: 7801 - DNA, 441 bp, Homo sapiens
caggcattgagctactgtgctcaacctgaggtcatgtatttttaattcataacttttacaaatatttactggatgactgccatgccaggcattttgaggaattcttggctactgtctgaccacctgaatccttggagccgaagaggagcgaggagcagtgttcactcttggaggaaatgggatatttcctccggccccttgattctgctctcccttttcttttcttttcttttctttctttttttttttgagacggagtttcgctcttgttgcccaggctggaatgcaatggtgcgatctcggctcaccacaacctccgcctcccaggttcaagcaattctcctgcctcagcctcccaaagtagctgggattaaagacatgcgccaccacactggctaattttttggtatttttagcagagatggggtttcactgtgttgg

SEQ ID NO: 7802 - DNA, 380 bp, Homo sapiens
  unsure (16): n=A,T,C or G
  unsure (17): n=A,T,C or G
ctgggggcggggtggnnagaagtgattcaacagagctacatgctttaaacttgcccaagttctacctccttcctttgaacatttcagattggagaaccaaggagttgattgcctgaacacctgaacatccgtttatgggggccagatagaatttgttttcaaataggcttaacaggcatcattaaaatttcattctgtgtgttttgtttaggcttgaggtgcttagaagatgggataaaatattctacttttttctaaattttaactttgtttcctatgtgatttttttaaatgtcctttctaaaatattctaaaattattgattcacaagtgccatgttcagaactatagaatattactgttacataatgtctgcacag

SEQ ID NO: 7803 - DNA, 546 bp, Homo sapiens
  unsure (17): n=A,T,C or G
  unsure (522): n=A,T,C or G
ctcaaggtgcactacangtacacggtagtcatgaagactcagcccgggctcccctacagccaggtccgggacatggtgtctaagaaactggagctccggctggaacacactaagctgagctatcggcctcgggacagcaatgagctggtgcccctttcagaagacagcatgaaggatgcctggggccaggtgaaaaactactgcctgactctgtggtgtgagaacacagtgggtgaccaaggctttccagatgaacccaaggaaagtgaaaaagctgatgctaataaccagacaacagaacctcagcttaagaaaggcagccaagtggaggcactcttcagttatgaggctacccaaccagaggacctggagtttcaggaaggggatataatcctggtgttatcaaaggtgaatgaagaatggctggaaggggagtgcaaagggaaggtgggcattttccccaaagtttttgttgaagactgcgcaactacagatttggaaagcactcggagagaagtctangatgtttcacaaactacaaagctg

SEQ ID NO: 7804 - DNA, 509 bp, Homo sapiens
ctggagggaccggagaacactggcgtctggcagccccgtttccactcctaccaagaaggctcaaagacgacggtcagctcaggcttttcttcttgaagtgtttctaacgcactttttgtctcataattgaaatacatttcagacaaccccaggttctgcaggaggcagctctgctgtttcagcacttcacagaacatcatgacccccaggtcgcccaggtcattgttgcccaggctcagctttcgcaggctctggctggaggtcagaagtgtggaaagatcccagcagcagtgtgacgtgaggttgcagttgtctaattccaacacctgaagcttgcagtcggggtgcaagagtccctcacagagtagtttgatccccttgtctccgagagtgttgcctcgcaggtaaaggtgcgtgagattctgattagtgctgagtaccgaggacaaagctgaacaacagactgacgtaaggccagaattcaccaaccccagtttctgcaggttaca

SEQ ID NO: 7805 - DNA, 518 bp, Homo sapiens
  unsure (311): n=A,T,C or G
  unsure (460): n=A,T,C or G
gaattttcattgttacataaatgtgtgaactagtttcaacagtgttctttcatatttactctgcaaatacaaaaaaccaaaacctgcagccagtggtcatttcaaaatctttttatgttcagatactgagccttcataagggttgactacctcagatttgctgcactcattgtggacttcatgtggatcacaacttctggataagaagattacaactattaagtgtcgatgtgaaccttgcaaccagctctactggattcttatcagaaatcctgcataaaaagtcagccatctgggttctgatctgctgnaaaagatgaagatttaagtgaccttaattaacctgtcctgtgccctacccttaaggaatactctctgtagtaggctgttgttatattagacttcctggaacacaccgctgaaaagaactgatgtgttcagatcatctgtgtagggctgngatttgtaatttaaactaattgtattctgaggtaaccacaaaataaattcaaccaaac

SEQ ID NO: 7806 - DNA, 283 bp, Homo sapiens
ccacaacaactgacgcggcctgcctgaagcccttgctgtagtggtggtcggagattcgtagctggatgccgccatccagagggcagaggtccaggtcctggaaggagcacttcatctgtttagggccatcagcttcaaagaacaagtcatcctcattgccactgtaataagccatcatttcactggcgagctcaggtacttctgccatggctgcttcagacacttgagcaatgaagattggctgaagagaatcccagagcagcctgttgtgccttgtgcctcg

SEQ ID NO: 7807 - DNA, 416 bp, Homo sapiens
  unsure (8): n=A,T,C or G
  unsure (19): n=A,T,C or G
  unsure (399): n=A,T,C or G
ccatcggngctgaaattgngcattttaaatagtacagtaggctggtatacattaggaaatggactgcactggaggcaaatagaaaactaaagaaattagataggctggaaatgcttactttctgctctcattttctttcattttgtctgctgtctttttgaatgccaatactttcatttaaaatgttttgggagcacggcaacccaaaatgactgaacggtggtccaaaaatccaaaccaactgataattacttctcgaggtgataggaaaggcacaggaagttaggactttggctgaaatgatgaaaacacatgttcgccattttagggatcagcgcctcgactcctgccacctccggctccaacgatgatcatgtttggatgtatttattgaattgncctttgctgatgaggaa

SEQ ID NO: 7808 - DNA, 598 bp, Homo sapiens
  unsure (9): n=A,T,C or G
  unsure (560): n=A,T,C or G
  unsure (589): n=A,T,C or G
ctgactctncaccttaaatgttcagagggacctacgtcagaggaccagaaagaaccagtttttctgacttgatcatcttgtaattcagataaaagctttgtaaatacaaaaaaacatgtcctcatgaattgcaagaaggaaaatagacccaaggagaggttcaaatggattaccttggagtgcagactagaaaggggtttatgggaatcacttgagaagtgaaacttgcccgaatagaatatatcctcaaattccgactttttctcttctggtgaaacaggaagaaggcactgtcagtattaaatagtaatttcctgtctgcaacaccacagtcattttttttttcctgatcagagaagtccctgaactacgagccttttggaggtcagtgtgagaagaagattgtttctgagcttgagaagcttctggaggattgaagagtatttgaagtctgtgtcaaacatccatatcataagtggaattttggagatattcaaagaatgctgtcagaagggtatctcagtggacttgagtactggaatgacatccactggagttgngcctcttataatgagcaggtggctggggnaaaaggaag

SEQ ID NO: 7809 - DNA, 450 bp, Homo sapiens
  unsure (76): n=A,T,C or G
ctgggggagacggggaagcaggtgtcggtgaggtctggcgttgttttaagaaaatgtctgcgttgagggtttgcanagaaagtttataaagactatcagtagagctgccaggtttgtgaactggaacggaatcccactccggtggaggagagtctttttcaccctctgagctactggtgttgcctaattcttgactattcgggaggaattttgctagggcaggtggtctgttatccactaacttacttgtaccttttgttttctgggcatttcgtgatttggatccacttgtcattgcagttggaagaggaatcttgcttgggagatttctacgttgcttactttccaaagggggagtatatggtagttctaatgaactgggtttcacatctgttgggatttctttcttaatatttaagagttttttgcttttttgcttcacttgagaca

SEQ ID NO: 7810 - DNA, 297 bp, Homo sapiens
  unsure (19): n=A,T,C or G
ccactgaactgcgctgccngtgcttgcagaccctgcagggaattcacctcaagaacatctaaagtgtgaaggtgaagtcccccggaccccactgcgcccaaaccgaagtcatagccacactcaagaatgggcagaaagcttgtctcaaccccgcatcgcccatggttaagaaaatcatcgaaaagatgctgaaaaatggcaaatccaactgaccagaaggaaggaggaagcttattggtggctgttcctgaaggaggccctgcccttacaggaacagaagaggaaagagagacacag

SEQ ID NO: 7811 - DNA, 506 bp, Homo sapiens
  unsure (351): n=A,T,C or G
ccagtggaatgatgttccctgcaattaccatctcacctatacgtgcaagaaaggaacagttgcttgcggccagccccctgttgtagaaaatgccaagacctttggaaagatgaaacctcgttatgaaatcaactccctgattagataccactgcaaagatggtttcattcaacgtcaccttccaactatccggtgcttaggaaatggaagatgggctatacctaaaattacctgcatgaaccgtaagtggtcctttagaaagaatggactaccgtgctataacaactactagacaccttcattttacggctgtggtatcggcagtttagggtatggagcaagtaatattgngtgttttctttttttctttctttccttccatgtagcatctgcataccaaaggacttattctatgaaatactttaaaaattcctcatcagcaaaggacaatttcaataaatacatccaaacatgatcatcgttggagccggaggtggcaggagtcg

SEQ ID NO: 7812 - DNA, 415 bp, Homo sapiens
  unsure (10): n=A,T,C or G
  unsure (409): n=A,T,C or G
ctggtggatncagcgcgcacacagaagacggcctaccagcggaatcgaatgagatttgcccagaggaacctccgcagagacaaagatcgtcggaacatgttgcagttcaacctgcagatcctgcctaagagtgccaaacagaaagagagagaacgcattcgactgcagaaaaagttccagaaacaatttggggttaggcagaaatgggatcagaaatcacagaaaccccgagactcttcagttgaagttcgtagtgattgggaagtgaaagaggaaatggattttcctcagttgatgaagatgcgctacttggaagtatcagagccacaggacattgagtgttgtggggccctagaatactacgacaaagcctttgaccgcatcaccacgaggagtgagaagccactgnggagca

SEQ ID NO: 7813 - DNA, 340 bp, Homo sapiens
  unsure (9): n=A,T,C or G
  unsure (10): n=A,T,C or G
ctgctgctnncttccttcagatatgacatttcagcctggcctctacagtaccatgaaacctaaattacttacttctctccagcttaatcctaggtggaggaattctagctgtggtttgtgaatgtacacaggtcagagaggtttagcaccttttgggaggaggaggtcagaatgcggtggtgaaacctctcccactgtgaccaacaaaccctcatacttaaaaagaagcatgcacctctggcttaaggatctggatgctactggaatttttgtctgtttcaattgtattcattagctttgaagaggagagagatggtggtggttaacttttttgttgcat

SEQ ID NO: 7814 - DNA, 544 bp, Homo sapiens
  unsure (9): n=A,T,C or G
ccatccagnctcctttgccaactgaggtgcagactgagttgtggaaggtgggtgttgatggaacccagcattacaatattgtgtagaactagtctcctaatatacctcactctgcaacttacggaagctgaggaagatcagaaaaagaccacactcctcactcagaatatttattatattctgccccatggggccttgcaggaaaagggacccaagctatacccctactccttttccaagctactttcctgaaccaagggacaggattctaagagaatcatgtatctcaaataagccagaatgtatctggggaagaatagccattaatttcctagacctgacactgggtttatttgtgtctgccaggaagacggggagtcagtgagaatcgtaaatggactagatgaggggaaataggatgggcccttctttatcacagcttgagctcaaaaaggttgggataaacaggtgtttaaaaaagagaggaggtaaaagggaggatgggcaggggatagaggaaggtcaggggttgggttcacccata

SEQ ID NO: 7815 - DNA, 270 bp, Homo sapiens
  unsure (9): n=A,T,C or G
  unsure (18): n=A,T,C or G
  unsure (19): n=A,T,C or G
  unsure (140): n=A,T,C or G
  unsure (151): n=A,T,C or G
  unsure (161): n=A,T,C or G
  unsure (170): n=A,T,C or G
  unsure (176): n=A,T,C or G
  unsure (185): n=A,T,C or G
gtaacttcnatgacaacnnagacctggaatgcgtgaccaatcttcaggaagtggcccgcatcgtgggcaactctggcctcaacatctacaatctctatgccccgtgtgctggaggggtgcccagccattttaggtatganaaggacactgntgtggtccangatttgggnaacatnttcactcgnctgccactcaagcggatgtggcatcaggcactgctgcgctcaggggataaagtgcgcatggaccccccctgcaccaacacaacag

SEQ ID NO: 7816 - DNA, 262 bp, Homo sapiens
  unsure (137): n=A,T,C or G
  unsure (144): n=A,T,C or G
  unsure (171): n=A,T,C or G
  unsure (172): n=A,T,C or G
  unsure (180): n=A,T,C or G
  unsure (188): n=A,T,C or G
tgactattttctactgtaggctgctttggaaataattcccatatccttgctttgtaagttggtaatatcactatgcatttctacacattttataaatttgatttatgcagattttgatacactgtatgtttctgtanaaattgnataaatattcaaaattttattaggatnnatttgagnaacttacntatatcttaattctgggttgcttgttttttaggtgacaaaaataaaatattgtattttaattcaaaaaaaaaaa

SEQ ID NO: 7817 - DNA, 551 bp, Homo sapiens
  unsure (526): n=A,T,C or G
  unsure (535): n=A,T,C or G
tgcttctctgctgctgtaacagggactagcacaggcacacggatgagtggggtcatttccagatattaggtcacagcagaagcagccaaaatggatccccagtgcactatgggactgagtaacattctctttgtgatggccttcctgctctctggtgctgctcctctgaagattcaagcttatttcaatgagactgcagacctgccacgccaatttgcaaactctcaaaaccaaagcctgagtgagctagtagtattttggcaggaccaggaaaacttggttctgaatgaggtatacttaggcaaagagaaatttgacagtgttcattccaagtatatgggccgcacaagttttgattcggacagttggaccctgagacttcacaatcttcagatcaaggacaagggcttgtatcaatgtatcatccatcacaaaaagcccacaggaatgattcgcatccaccagatgaattctgaactgtcagtgcttgctaacttcagtcaacctgaaatagtaccaatttctnatataacanaaaatgtgtacataaa

SEQ ID NO: 7818 - DNA, 470 bp, Homo sapiens
  unsure (8): n=A,T,C or G
  unsure (9): n=A,T,C or G
  unsure (18): n=A,T,C or G
  unsure (92): n=A,T,C or G
  unsure (102): n=A,T,C or G
  unsure (107): n=A,T,C or G
  unsure (118): n=A,T,C or G
  unsure (127): n=A,T,C or G
  unsure (141): n=A,T,C or G
  unsure (421): n=A,T,C or G
tgaaatannacagcaccnagaaaataatttagttttgcttgcttccattgatcagtcttttacttgaggcattaaatatctaattaaatcgngaaatggcantatantccatgatatntaaggagtnggcaagcttaacanaacccattttttataaatgtccatcctcctgcatttgttgataccactaacaaaatgctttgtaacagacttgcggttaattatgcaaatgatagtttgtgataattggtccagttttacgaacaacagatttctaaattagagaggttaacaagacagatgattactatgcctcatgtgctgtgtgctctttgaaaggaatgacagcagactacaaagcaaataagatatactgagcctcaacagattgcctgctcctcagagtctctcctatttttgnattacccagctttctttttaatacaaatgttatttatagtttacaatga

SEQ ID NO: 7819 - DNA, 338 bp, Homo sapiens
  unsure (154): n=A,T,C or G
  unsure (279): n=A,T,C or G
  unsure (293): n=A,T,C or G
  unsure (324): n=A,T,C or G
ctgtgacgcctgaataactgtctactttatcttcactgaaccactcactctgtgtaaaggccaacagatttttaatgtggttttcatatcaaaagatcatgttgggattaacttgcctttttccccaaaaaataaactctcaggcaagcatttntttaaagctattaagggagtatatacttgagtacttattgaaatggacagtaataagcaaatgttcttataatgctacctgatttctatgaaatgtgtttgacaagccaaaattctaggatgtanaaatctggaaagtncatttcctgggattcacttctccagggattntttaaagttaattt

SEQ ID NO: 7820 - DNA, 431 bp, Homo sapiens
  unsure (415): n=A,T,C or G
  unsure (423): n=A,T,C or G
  unsure (425): n=A,T,C or G
ctgtggctgtctgtcagagaagcacatttttctgcagataattagaatggcttcccccatctctcacggactgtcccaagtctagaaaagaattgagttcctcttctattagtcaaataaaagggaagagaatgtttgtcttcctttcctttctgtagtgttaagaaaataaacgaacttaatgattctaaattatcagtgagcttaacactgtactatagaccaaagattaccttttcaaaaagtcctttgaggtgaaatattttgtatacgtaatacatagatgcacatataaacacacacatatagaatctcaatattttaacacttctttgggtagttgtactaactcactaaccctgaggaaaaagttaagaaattgaaagtgttttcttcaaaagttgagatttaacantaaaaggngntacttt

SEQ ID NO: 7821 - DNA, 566 bp, Homo sapiens
  unsure (507): n=A,T,C or G
  unsure (508): n=A,T,C or G
  unsure (538): n=A,T,C or G
agtgacttgacttctttaagccttggtttctttttcagtgagatttacagcttagactagtttctgaatcttgaccctgtggacaatctagttggagaactgagatgacctgggcattgtaggatgtttagcaacattcctgcctctgtaaactagacacagcagcacatttacccaacctgctctgactgtgacaaccagaaatgtctccaggcattgccaaatgtcaactgagggcaaaattgcctaccctagccaccttaactgaaaactacaaacttcattgaaataatttctttatggctcccagcagtaacactgtgctattctagaccagttggttaaactactggatgcttcatcagaaagcacccactaagcatcactcaccatgaagttcgttgggtactctatacaatgaacaaaggagatatcacataatttttaaaaaacttaaaagattcacaggtgagaattttgtagtaacaattaagtattaactattannaaaaatttaagaagttttaacaaaatgatntaaaaatatattcactataagtaggatg

SEQ ID NO: 7822 - DNA, 569 bp, Homo sapiens
ctgagtctcacaaagatgccgtggaaagcagatactctagaacggaaggctcccttgatggaacttagacagcaaggccagatgcacatccctggaaggacatccatgttccgagaagaacagatgatccctgtatttcaagacctctgtgcacttatttatgaacctgccctgctcccacagaacacagcaattcctcaggctaagctgccggttcttaaatccatcctgctaagttaatgttgggtagaaagagatacagaggggctgttgaatttcccacataccctccttccaccaagttggaacatccttggaaattggaagagcacaagaggagatccagggcaaggccattgggatattctgaaacttgaatattttgttttgtgcagagataaagaccttttccatgcaccctcatacacagaaaccaattttcttttttatactcaatcatttctagcgcatggcctggttagaggctggttttttctcttttcctttggtccttcaaaggcttgtagttttgggtagtccttgttctttggaaatacacagtgctgacc

SEQ ID NO: 7823 - DNA, 277 bp, Homo sapiens
tgatctctttcagtgcaccgccacttatgttacctttttccttttatttctttgtgtttccagttgcaagaacagcaaggaaaaggaagccctctccagaaccagaaggtgaagtcgggccccctaagatcaacggagaggcccagccgtggctgtccacatccacagaggggctcaagatccccatgactcctacatcctcttttgtgtctccgccaccacccactgcctcacctcattccaaccggaccacaccgcctgaagcggcccagaatgg

SEQ ID NO: 7824 - DNA, 510 bp, Homo sapiens
ccagggtgccacaaacccaaagcaaagtttcaaaataatataaaatttaaaaagttttgtacataagctattcaagatttctccagcactgactgatacaaagcacaattgagatggcacttctagagacagcagcttcaaacccagaaaagggtaatgagatgagtttcacatggctaaatcagtggcaaaaacacagtcttctttctttctttctttcaaggaggcaggaaagcaattaagtggtcacctcaacataagggggacatgatccattctgtaagcagttgtgagggggtagagatgggacaaaattttggtctcagaggtcttaccatcttaatttggtaacttctaatgaaaaaaataaaaaatagaaataacattatccaaagatatcttaaagctgaaaacttgaacagcacattttttgtttttgttgttgtttggctaactcctcctggaatcacctttctggtttagctagtactttgtacagaacaatgaggt

SEQ ID NO: 7825 - DNA, 525 bp, Homo sapiens; identical to SEQ ID NO: 601
  unsure (513): n=A,T,C or G

SEQ ID NO: 7826 - DNA, 380 bp, Homo sapiens
  unsure (31): n=A,T,C or G
  unsure (39): n=A,T,C or G
  unsure (101): n=A,T,C or G
  unsure (107): n=A,T,C or G
  unsure (118): n=A,T,C or G
  unsure (135): n=A,T,C or G
  unsure (150): n=A,T,C or G
  unsure (158): n=A,T,C or G
  unsure (166): n=A,T,C or G
  unsure (205): n=A,T,C or G
  unsure (213): n=A,T,C or G
  unsure (231): n=A,T,C or G
  unsure (235): n=A,T,C or G
  unsure (246): n=A,T,C or G
  unsure (306): n=A,T,C or G
  unsure (328): n=A,T,C or G
  unsure (340): n=A,T,C or G
  unsure (352): n=A,T,C or G
  unsure (370): n=A,T,C or G
tacaagctttttttttttttttttttttttngacagttnatcttttattttctgcaaatttaggaacatatttactcgttttcacattgaatcttaagttnaagctnttcatttggtntttaggcaatatatganaaaaaaatttttttngttcattngtaatttnaacaagttgaacattttaccatgattgaacatgtttttnttacagtntttaacattcccccaaanaatnccctgcaaagngtaaacctttgtcccatactgggatattactgttctgctacaataaatgtcaaacctaancactttgcagttcactactttngggaaaatgttntagggaactgtntcacaggtgaaactgttncccataaagg

SEQ ID NO: 7827 - DNA, 566 bp, Homo sapiens; identical to SEQ ID NO: 433

SEQ ID NO: 7828 - DNA, 440 bp, Homo sapiens
  unsure (187): n=A,T,C or G
  unsure (370): n=A,T,C or G
  unsure (396): n=A,T,C or G
ccattggtgcgtgtttcattcagatcacctctggaatctctgtggttgtgaaggcaattccttatgagactcttgcctcctgtggcttacgtgatgaattgttaatatggcagtaattaattagtatctacttaaatttagtggtcagaaatgtatttgaagtgccttaaagatgatcatggttcanaatatcttcagagaaagcaaaatctttaatattgcagggagcctagcaatacaaatacacatttctgtggcttgatttcttgaatatgctgagacccaatttggactacatttggcagaaatcatggagtaaacagcaaggctttaaattaaattaatagttacaaggtaggttggctcttangtgaatttagccatgtcaactaatangcttttatatggtatgtaacaaatctgaattatgttatgctgtg

SEQ ID NO: 7829 - DNA, 508 bp, Homo sapiens
ctggggtgggcttctcctactccgatgacaagttttatgcaactaatgacactgaggtcgcccagagcaattttgaggcccttcaagatttcttccgcctctttccggagtacaagaacaacaaacttttcctgaccggggagagctatgctggcatctacatccccaccctggccgtgctggtcatgcaggatcccagcatgaaccttcaggggctggctgtgggcaatggactctcctcctatgggcagaatgacaactccctggtctactttgcctactaccatggccttctggggaacaggctttggtcttctctccagacccactgctgctctcaaaacaagtgtaacttctatgacaacaaagacctggaatgcgtgaccaatcttcaggaagtggcccgcatcgtgggcaactctggcctcaacatctacaatctctatgccccgtgtgctggaggggtgcccagccattttaggtatgagaaggacactgttgtggtcca

SEQ ID NO: 7830 - DNA, 126 bp, Homo sapiens
ccaaagtgttaactagttttactacaatgtttggtgtttgtgtggaaattatctgcctggtgtgtgcacacaagtcttacttggaataaatttactggtacaaattcttaaaaaaaaaagaaaaaa

SEQ ID NO: 7831 - DNA, 505 bp, Homo sapiens
  unsure (8): n=A,T,C or G
  unsure (11): n=A,T,C or G
  unsure (433): n=A,T,C or G
  unsure (495): n=A,T,C or G
caggactngantcgtatcttcccactttctgaggactactctggatcaggcttcggctccggctccggctctggatcaggatctgggagtggcttcctaacggaaatggaacaggattaccaactagtagacgaaagtgatgctttccatgacaaccttaggtctcttgacaggaatctgccctcagacagccaggacttgggtcaacatggattagaagaggattttatgttataaaagaggattttcccaccttgacaccaggcaatgtagttagcatattttatgtaccatggttatatgattaatcttgggacaaagaattttatagaaatttttaaacatctgaaaaagaagcttaagttttatcatccttttttttctcatgaattcttaaaggattatgctttaatgctgttatctatcttattgntcttgaaaatacctgcattttttggtatcatgttcaaccaacatcattatgaaattaattanattcccatgg

SEQ ID NO: 7832 - DNA, 491 bp, Homo sapiens
ccagtgaacacgaaatgtgcctgacatccctaataatcaaagaaatacaaattaaaacacaatcataccaattttcatctaacagattggcaaaaatgtaaaggatcatgtgtatattcattgcagtgttgcttgtaatagcatacagcttgagtgacctccagtagaggtgatgtttaaatatattttgctgcattcttaaaaggaaatgtagcataatgcagccatttggagagaatgagataactatatgcactctctttgaaagttttgtgactactatgtgccgggagttgcactgggctttctttaaggtattttcagcaaacctgtcttttaatgatttatattgtacctaataagagatatatgaatggaaaaacagtttttgctctcacatcatgacaatcaacacaaaagacttctgtgaccaaatgtgtggagttttcttccaccaacaagcaagcaatcaattctgcagcggacaccag

SEQ ID NO: 7833 - DNA, 343 bp, Homo sapiens
  unsure (8): n=A,T,C or G
ccacttgngtgggtcctcacaagcaaagagagcactaaacttgacattgggggtccaccactccaactttgctttctgaaggttttggtgtacattgagccccagaaggaaaggagagtatctgtgagtgggggcctcccttgaccccagtacgaagtctatgccctgaatccccagagtagcccttcctggtgcccaactggcctggggacaaacagcgtccactacatctaggactgccggctaagtggacacacttcttgacctcctaccaggaactttggtaaaagctagctttggggaaggggttgggtgtaaatatgagagggtggagggagaccag

SEQ ID NO: 7834 - DNA, 550 bp, Homo sapiens
  unsure (542): n=A,T,C or G
ctgtagaagtaggggtttggcttctggcccagatccacgcccttgtcctctgtcaaaaagagaggtggcagctcagcaccattctgttgggatcaggtaactcaggaaaggggctagatgctgtgggcctagagtaagtctccataaaggctggggaagcacacacctgtcatcacctggaaggcagccacactgacgtaatcctctgccactttctggaagagctcgtctggcaggaaaaatgatgatcagcgagggcccaatgccagtagccctgggatctcccagtgacccagccctctgtgccctattcagcttcctctggtgcccctgcatgttcctgctgtgaggctccagcacagcactcacccacactctggcctgtcttgctggatgtttcaaagagctgagctttgatatctgtaaagagaagtgactaaagcctcatacctgagaattagataaacagacaaaagggagggctagcagttcagggagtctcctggaccccacagttcaaggaggccaggaagacctcctanagcacctt

SEQ ID NO: 7835 - DNA, 314 bp, Homo sapiens
  unsure (264): n=A,T,C or G
  unsure (266): n=A,T,C or G
  unsure (279): n=A,T,C or G
  unsure (301): n=A,T,C or G
ccttatttctcttgtcctttcgtacagggaggaatttgaagtagatagaaaccgacctggattactccggtctgaactcagatcacgtaggactttaatcgttgaacaaacgaacctttaatagcggctgcaccatcgggatgtcctgatccaacatcgaggtcgtaaaccctattgttgatatggactctagaataggattgcgctgttatccctagggtaacttgttccgttggtcaagttattggatcaattgagtatagnanttcgctttgactngtgaagtcttagcatgtactgntcggaggttgggt

SEQ ID NO: 7836 - DNA, 539 bp, Homo sapiens
cctgactattctcaattctccccactgcagtgttcacgcaacttccctgaatatagggtctccttaaacacatctgagcactgacctggatgagtgcacttgggagacctggtgacaggcacaaaaagcatgatcagggctagcctcaatacagggagaaatcatggatatttaaaaatacttttttgattcagattccggtatgactgaagagcaacaccatgttgagaactggaggaagacagggttctggtgccagaagctcttctccaatctttaaagccaggcttgctcaccaaggtgctcagtaatgtctctcacccctgcccatatatagcattaaaaagtgaacaaaagacagataaagatagaattcaaaaaggaaaaaaagtaaggaagcagagggacagaaacttagaagagaaaaccaaggtcaacagtcaaaaaggatggtgggaaagaatgtttagatttcaaaatttaaaagccccgagctaggaagaacctgaaaactgagtactcctcagtgaaaggccatc

SEQ ID NO: 7837 - DNA, 397 bp, Homo sapiens
cctactatgggtgttaaattttttactctctctacaaggttttttcctagtgtccaaagagctgttcctctttggactaacagttaaatttacaaggggatttagagggttctgtgggcaaatttaaagttgaactaagattctatcttggacaaccagctatcaccaggctcggtaggtttgccgcctctacctataaatcttcccactattttgctacatagacgggtgtgctcttttagctgttcttaggtagctcgtctggtttcgggggtcttagctttggctctccttgcaaagttatttctagttaattcattatgcggaaggtataggggttagtccttgctatattatgcttggttataatttttcatctttcccttgcggtactata

SEQ ID NO: 7838 - DNA, 428 bp, Homo sapiens
cctgtccatacactaaagaacatctcattgactgtgacaatgggcgagatgaatgatgggttataaatatttctctcttccttaatagctaacaatcttctccaaggactgtggactcctgttccctgctcatcatgtcatgggcatctgccaggaaccatctttgatggtgtaaaaatcttgaatacataagagggaaattttagacttgttagaaagaagccaagcaattgagaccttagatagaacttagaattctcaccgagttttgttgggtaattgttacttcaaaaaaaaatgcaatttctgttccctctttcctccaaccatttatctgggaagcaagttattggcaacccagagctgattgttggagccggggaaaatggtgtgaaatgtgagaaaatgtaattgagataataaaaaca

SEQ ID NO: 7839 - DNA, 447 bp, Homo sapiens
tttggcttcagggtggggtttggaagcttctggaagtcgtgctggtctcccaggtgaggcaagccatggttgctgggctgtagggtgagtggcttgcttggtgggacctgacgagttggtggcatgggaaggatgtgggtctctagtgccttgccctggcttagctgcaggagaagatggctgctttcacttccccccattgagctctgctccctctgagcctggtcttttgtccttttttattttggtctccaagatgaatgctcatctttggagggtgccaggtagaagctagggaggggagtgtcttctctctccaggtttcaccttccagtgtgcagaagttagaagggtctggcgggggcagtgccttacacatgcttgattcccacgctaccccctgccttgggaggtgtgtggaataaattatttttgttaaggtaaaaa

SEQ ID NO: 7840 - DNA, 322 bp, Homo sapiens
  unsure (9): n=A,T,C or G
  unsure (14): n=A,T,C or G
  unsure (99): n=A,T,C or G
ctgatgaangcatntgatgccttcatctgttcagtcatctccaaaaacagtaaaaataaccactttttgttgggcaatatgaaatttttaaaggagtanaataccaaatgatagaaacagactgcctgaattgagaattttgattttttaaagtgtgtttctttctaaattgctgttccttaatttgattaatttaattcatgtattatgattaaatctgaggcagatgagcttacaagtattgaaataattactaattaatcacaaatgtgaagttatgcatgatgtaaaaaatacaaacattctaattaaaggctttgcg

SEQ ID NO: 7841 - DNA, 423 bp, Homo sapiens; identical to SEQ ID NO: 275

SEQ ID NO: 7842 - DNA, 530 bp, Homo sapiens
  unsure (516): n=A,T,C or G
atattttatgcatgggtgcatgcacacacacacacatttataagaaaagaattataaaaaataccaacataataattttctctaggaggtgggaataacagtgagttttctttccttttattttttaaaatctatatttttatggttaaaaaaatgtgataaggtaaataccaagtatatacatttgaatttcatgacatactttttaaatttatgcttgatactttcagaccatcagacctttattacaccttgttttaatgcttattttctctttgtttcattcccgtgaaaaatgaaaagtctttgtcattttctctctgaatctgtatctttgtctcccttttttcctcccgctctcctactttctcacactagacgtttcataggaattaaaagtattaaagggtggtcaattcttatttgcctttggaaacccagaatgtgcacagtatttagtaaactttcatctattatgtaaattcttaatgctttgaagaagcacaaatggactgnatttacctccattg

SEQ ID NO: 7843 - DNA, 478 bp, Homo sapiens
ctgttgtgttggtgcagggggggtccatgcgcactttatcccctgagcgcagcagtgcctgatgccacatccgcttgagtggcaggcgagtgaagatgttgcccaaatcctggaccacaacagtgtccttctcatacctaaaatggctgggcacccctccagcacacggggcatagagattgtagatgttgaggccagagttgcccacgatgcgggccacttcctgaagattggtcacgcattccaggtctttgttgtcatagaagttacacttgttttgagagcagcagtgggtctggagagaagaccaaagcctgttccccagaaggccatggtagtaggcaaagtagaccagggagttgtcattctgctcataggaggagagtccattgcccacagccagcccctgaaggttcatgctgggatcctgcatgaccagcacggccagggtggggatgtagatgccagcatagctctc

SEQ ID NO: 7844 - DNA, 559 bp, Homo sapiens
ccaagaacctcttccaccgggccatttctgagagtggcgtggccctcacttctgttctggtgaagaaaggtgatgtcaagcccttggctgagcaaatttctatcactgctgggtgcaaaaccaccacctctgttgtcatggttcactgcctgcgacagaagacggaagaggagctcttggagacgacattgaaaatgaaattcttatctctggacttacagggagaccccagagagagtcaaccccttctgggcactgtgattgatgggatgctgctgctgaaaacacctgaagagcttcaagctgaaaggaatttccacactgtcccctacatggtcggaattaacaagcaggagtttggctggttgattccaatgcagttgatgagctatccactctccgaagggcaactggaccagaagacagccatgtcactcctgtggaagtcctatccccttgtttgcattgctaaggaactgattccagaagccactgagaaatacttaggaggaacagacgacactgtcaaaaagaaagacctgttcctggacttgatagc

SEQ ID NO: 7845 - DNA, 422 bp, Homo sapiens
  unsure (10): n=A,T,C or G
  unsure (46): n=A,T,C or G
  unsure (52): n=A,T,C or G
  unsure (65): n=A,T,C or G
  unsure (171): n=A,T,C or G
  unsure (200): n=A,T,C or G
  unsure (228): n=A,T,C or G
  unsure (229): n=A,T,C or G
  unsure (235): n=A,T,C or G
  unsure (265): n=A,T,C or G
  unsure (275): n=A,T,C or G
  unsure (287): n=A,T,C or G
  unsure (307): n=A,T,C or G
  unsure (312): n=A,T,C or G
  unsure (365): n=A,T,C or G
  unsure (392): n=A,T,C or G
  unsure (400): n=A,T,C or G
  unsure (406): n=A,T,C or G
attttaatgnccctgtgtactaaatgactactcatcgagtatgcanaatttnacagaggaaatanaatgctgatatacatatgaaagaaaatatcctcagcatggtgatttattgtcttgtataataatagtagaacattttagaactagtacttttatgattgtattttnttcctgttcacattccaaacttttctgtnttattttcattctatatgtgatcttganncagctnattcctttctgcaactgatttaatctcatnttgacaaatntgacctagaagngttttgagtaatattaaatnttaancacatacatattattaatgaaccatctgtgatttatcttataagaggaaaacntgacaatcattaaaatgtttaccaaanaaaatatngctgangtgctaggtcaaaata

SEQ ID NO: 7846 - DNA, 467 bp, Homo sapiens
  unsure (394): n=A,T,C or G
ctgcccctggctaggtagttaaaactgtgtatgccttcccttgtacaatgtgggactttggtggaactgcctgggagaacttcataattactaccctgtatgtcatgccccttgcaggtaaaacagaagtggcagagcagaggtcaaaggcacagatcagcaaagggaatcctactggatcctgagactagcctggaaggggtgtcatttgtcactgggaatagaggtgcacggcctggtggaccctccgagagagcttaagattcatttttaaaacagaggatttaaaagacacaataggcattggaatcgggtagtaagaagagaaaaccagagccccaagtgaggaagtgggtgatctgtcctcacacagttggtgggggagctgggcctncccactgactggactctcaggtccttaagaggtgctctgtcctgcacaccccaaatgaccacctaaattcagg

SEQ ID NO: 7847 - DNA, 473 bp, Homo sapiens
ccacactctacttctgcttctgccacctatggggtcgaggcaggtgtggtgccttggctaagtccacagacttctgagaggcccacgctttcttcttctccagaaataaaccctgaaactcaagcagctttaatcagagggcaggattccacgatagcagcatcagaacagcaagtggcagcgagaattcttgattccaatgatcaggcaacagtaaaccctgtggaatttaatactgaggttgcaacaccaccattttcccttctggagacttctaatgaaacagatttcctgattggcattaatgaagagtcagtggaaggcacggcaatctatttaccaggacctgatcgctgcaaaatgaacccgtgccttaacggaggcacctgttatcctactgaaacttcctacgtatgcacctgtgtgccaggatacagcggagaccagtgtgaacttgattttgatgaatgtca

SEQ ID NO: 7848 - DNA, 499 bp, Homo sapiens
  unsure (348): n=A,T,C or G
ggcgaatcttgcgccggtttagacaaaggaggccgtgaggacctgcatgcttttctttctcaggcatgcttcggaaactggacatcaaaaacgaagacgatgtgaaatcgttgtctcgagtgatgatccatgttttcagcgacggcgtaacaaactggggcaggattgtgactctcatttcttttggtgcctttgtggctaaacacttgaagaccataaaccaagaaagctgcatcgaaccattagcagaaagtatcacagacgttctcgtaaggacaaaacgggactggctagttaaacaaagaggctgggatgggtttgtggagttcttccatgtagaggacctanaaggtggcatcaggaatgtgctgctggcttttgcaggtgttgctggagtaggagctggtttggcatatctaataagatagccttactgtaagtgcaatagttgacttttaaccaaccaccaccaccaccaaaaccagtttatgcagttgga

SEQ ID NO: 7849 - DNA, 513 bp, Homo sapiens
  unsure (10): n=A,T,C or G
  unsure (226): n=A,T,C or G
ctgtggaggnaaaaacatacccctggttcagttccttatttggtgcaggccatgcagtgtagatgtataaagagaaagctgatgcttggatattaactgccttgatgctacacacctagaatgtcttttacttacttccaggttcatccgtccctcttttccagggaacacgcctaaaaaaaagggcaactgtgcagagtacaatataaatccccaaataacccangtttccaattttgtttccattccctagtatcatcatctgtttctttaccccagtgtgaaaaagctgattaatttaatgagaccacaataacaaactgtatttatcaggtcacatccaaatcattccattctagaaataaaatttcttttaaacgaactactttaaatgttttactgattaatgagactactgataaaactttgctttttttgtaatctaaaaatacactgcaacaaactaaaaagaacacggaggatgttagtattccatgtgttttttaacacata

SEQ ID NO: 7850 - DNA, 616 bp, Homo sapiens
  unsure (546): n=A,T,C or G
  unsure (578): n=A,T,C or G
aaccgacgaggactctctcattgagatcatctgctccagaaccaaccaggagctgcaggaaattaacagagtctacaaggaaatgtacaagactgatctggagaaggacattatttcggacacatctggtgacttccgcaagctgatggttgccctggcaaagggtagaagagcagaggatggctctgtcattgattatgaactgattgaccaagatgctcgggatctctatgacgctggagtgaagaggaaaggaactgatgttcccaagtggatcagcatcatgaccgagcggagcgtgccccacctccagaaagtatttgataggtacaagagttacagcccttatgacatgttggaaagcatcaggaaagaggttaaaggagacctggaaaatgctttcctgaacctggttcagtgcattcagaacaagcccctgtattttgctgatcggctgtatgactccatgaagggcaaggggacgcgagataaggtcctgatcagaatcatggtctcccgcagtgaagtggacatgttgaaaattangtctgaattcaagagaaagtacggcaagtccntgtactattatatccagcaagacactaagggcgactac

SEQ ID NO: 7851 - DNA, 210 bp, Homo sapiens
  unsure (12): n=A,T,C or G
ctgacggcggcnacatgactctgaaccccagggcacctactgacgatgataaaaacatctacctgactcttcctcccaacgaccatgtcaacagtaataactaaagagtaacgttatgccatgtggtcacactctcagcttgctgagtggatgacaaaaagaggggaattgttaaaggaaaatttaaatggagactggaaaaattcctga

SEQ ID NO: 7852 - DNA, 485 bp, Homo sapiens
  unsure (477): n=A,T,C or G
cctgcttacaagctgccaactgtaaaaattgtggtagactatctcaagtaagtttccattctcatgaccacattaccaatgtaagtggcacaaaacagattattaatcaattaattaagcaaattgtgcatcactggcttatctttacttccaaaggcttatctttacttctaaagaaaaataagacagtgaagtcctccagttgccaaataaaatgcaaccaaattgtcagcagaatttcagaatcattatgattctaatagccatgttttattgaatgcttaagaatgtgctaaacattgttctaattgctttatgtgcattgtagcatatcatcctcaacaaacagaaaacaacaaaaatgttatttagatttttaaaaatatgcaaatgtctctaataaagttacgtaactgtagttacccaaattactttgaaaaaaatggactgctttggcaggtaattattctttgcaangacacata

SEQ ID NO: 7853 - DNA, 532 bp, Homo sapiens
  unsure (506): n=A,T,C or G
ccagtggaatgatgttccctgcaattaccatctcacctatacgtgcaagaaaggaacagtcgcttgcggccagccccctgttgtagaaaatgccaagacctttggaaagatgaaacctcgttatgaaatcaactccctgattagataccactgcaaagatggtttcattcaacgtcaccttccaactatccggtgcttaggaaatggaagatgggctatacctaaaattacctgcatgaacccatctgcataccaaaggacttattctatgaaatactttaaaaattcctcatcagcaaaggacaattcaataaatacatccaaacatgatcatcgttggagccggaggtggcaggagtcgaggcgctgatccctaaaatggcgaacatgtgttttcatcatttcagccaaagtcctaacttcctgtgcctttcctatcacctcgagaagtaattatcagttggtttggatttttggaccaccgttcagtcattttgggttgccgngctcccaaaacattttaaatgaaagt

SEQ ID NO: 7854 - DNA, 558 bp, Homo sapiens
ccaagtattattttgaaaaagtacttaggtcacttaaaatgtgaataatccaaccacaatgattaaaattcatcagctacccattactttataccttggaatagggtttcttgactttagtactactgacacactgttatgacaaccacaagtatctccagacactttccaatgtcccctttgggggcaaaatcatgccagttgagaaccactgcccaagaacaatgtctgcactttggcctatctttaaagtctttattttttcatgtttataattctagaatatccaactttcatttaacatcagtttaaatactttacatgttactacacaatgactgttttaatgcccacctatggagatgcattacagtattataaaaccacaattttcccatggctactagaaatctatattatttacaatatagctgttagaaaacatttgaaattacttccttaagacacatctatcaaattaaaaactcatgcactgggtcacttgactattttaatgattcaatcataattctaatacagagtgtcttccaaaatagc

SEQ ID NO: 7855 - DNA, 273 bp, Homo sapiens
ggcacaacaggctgctctgggattctcttcagccaatcttcattgctcaagtgtctgaagcagccatggcagaagtacctgagctcgccagtgaaatgatggcttattacagtggcaatgaggatgacttgttctttgaagctgatggccctaaacagatgaagtgctccttccaggacctggacctctgccctctggatggcggcatccagctacgaatctccgaccaccactacagcaagggcttcaggcaggccgcgtcagttgttgtgg

SEQ ID NO: 7856 - DNA, 510 bp, Homo sapiens; identical to SEQ ID NO: 603
  unsure (234): n=A,T,C or G
  unsure (495): n=A,T,C or G

SEQ ID NO: 7857 - DNA, 491 bp, Homo sapiens
  unsure (105): n=A,T,C or G
  unsure (335): n=A,T,C or G
  unsure (391): n=A,T,C or G
  unsure (460): n=A,T,C or G
  unsure (461): n=A,T,C or G
  unsure (476): n=A,T,C or G
cctactatgggtgttaaattttttactctctctacaaggttttttcctagtgtccaaagagctgttcctctttggactaacagttaaatttacaaggggatttanagggttctgtgggcaaatttaaagttgaactaagattctatcttggacaaccagctatcaccaggctcggtaggtttgtcgcctctacctataaatcttcccactattttgctacatagacgggtgtgctcttttagctgttcttaggtagctcgtctggtttcgggggtcttagctttggctctccttgcaaagttatttctagttaattcattatgcagaaggtatangggttagtccttgctatattatgcttggttataatttttcatctttcccttgcggnactatatctattgcgccaggtttcaatttctatcgcctatactttatttgggtaaatggtttggctaannttgtctggtaataangtggagtgggtttgg

SEQ ID NO: 7858 - DNA, 297 bp, Homo sapiens
ccactgaactgcgctgccagtgcttgcagaccctgcagggaattcaccccaagaacatccaaagtgtgaacgtgaagtcccccggaccccactgcgcccaaaccgaagtcatagccacactcaagaatgggcggaaagcttgcctcaatcctgcatcccccatagttaagaaaatcatcgaaaagatgctgaacagtgacaaatccaactgaccagaagggaggaggaagctcactggtggctgttcctgaaggaggccctgcccttataggaacagaagaggaaagagagacacag

SEQ ID NO: 7859 - DNA, 433 bp, Homo sapiens; identical to SEQ ID NO: 276
  unsure (3): n=A,T,C or G
  unsure (4): n=A,T,C or G
  unsure (14): n=A,T,C or G
  unsure (189): n=A,T,C or G
  unsure (231): n=A,T,C or G
  unsure (299): n=A,T,C or G
  unsure (302): n=A,T,C or G
  unsure (324): n=A,T,C or G
  unsure (373): n=A,T,C or G
  unsure (374): n=A,T,C or G

SEQ ID NO: 7860 - DNA, 529 bp, Homo sapiens
  unsure (496): n=A,T,C or G
cctagaaaacaaaagaacagccaagaggaactcaaaagccaaaggaaaaagtgattctgaagatggggagaaggaaaatgaaaaatctaaaacttcagattcttcaaatgacgaatctagttcaatagaagacagttcttccgattctgaatcagagtcagaacctgaaagtgaatctgaatccagaagagtcactaaggagaaagaaaagaaaacaaagcaagatagaactcctcttaccaaagatgtttcacttctagatctggatgattttaacccagtatccactccagttgcacttcccacaccagctctttctccaagtttgatggctgatcttgaaggtttacacttgtcaacttcctcttcagtcatcagtgtcagtactcctgcatttgtaccaacgaaaactcacgtgctgcttcatcgaatgagtggaaaaggactagctgcccattatttctttccaagacagccttgcatttttggtgataanatggtctctatacaaataacactgaataacact

SEQ ID NO: 7861 - DNA, 396 bp, Homo sapiens
ccatgggttataagccgaaggcatatttgagggattttatgtatgtgtctcaggatccaaaagatcaactattacttggaccaacatatgctactccaaaagttctagaaaaggcaggattgaccatgaatgatattgatgcttttgaatttcatgaagctttctcgggtcagattttggcaaattttaaagccatggattctgattggtttgcagaaaactacatgggtagaaaaaccaaggttggattgcctcctttggagaagtttaataactggggtggatctctgtccctgggacacccatttggagccactggctgcaggttggtcatggctgctgccaacagattacggaaagaaggaggccagtatggcttagtggctgcgtgtgcag

SEQ ID NO: 7862 - DNA, 565 bp, Homo sapiens
  unsure (179): n=A,T,C or G
  unsure (374): n=A,T,C or G
  unsure (451): n=A,T,C or G
ttttttttaaatggttctttattcataaacttgatgcaagtttacaaaatttactgtacattgccaaataaatctgcaattaaaaataaaatccattaaacaaagcatgccaaatgtgcagctatcagtctgcttgccatcaggatattaaagaattcaacaatgtattcaagatttanccttaggcttaaggaactttactgatttaaagaattctgccttgtcacttgttatctgagcaactggcaatcagaactttatacaaatgtaatcaagtgaacaagaataccagaaaatctatttactgctctcttaaccaaaatggaatcaaaagaaattaaacacacacaatgtagaaatgacaagtctctcanatgtggtttacaaagttaaaaactgaatctcaaagctaatgcacaagaaacacttttgaactttgtaacttgtttgngcagaaaaatgtgcttctggatttcttgttaaaagtgcttaagaactagaatttacttttaaatcaaacgtgggtgtataaaaaaatctattaccaaccaaaaaggactgattc

SEQ ID NO: 7863 - DNA, 477 bp, Homo sapiens
  unsure (38): n=A,T,C or G
  unsure (42): n=A,T,C or G
  unsure (75): n=A,T,C or G
  unsure (104): n=A,T,C or G
  unsure (109): n=A,T,C or G
  unsure (112): n=A,T,C or G
  unsure (121): n=A,T,C or G
  unsure (125): n=A,T,C or G
  unsure (127): n=A,T,C or G
  unsure (132): n=A,T,C or G
  unsure (144): n=A,T,C or G
  unsure (147): n=A,T,C or G
  unsure (154): n=A,T,C or G
  unsure (183): n=A,T,C or G
  unsure (191): n=A,T,C or G
  unsure (202): n=A,T,C or G
  unsure (234): n=A,T,C or G
  unsure (246): n=A,T,C or G
  unsure (254): n=A,T,C or G
  unsure (263): n=A,T,C or G
  unsure (273): n=A,T,C or G
  unsure (278): n=A,T,C or G
  unsure (286): n=A,T,C or G
  unsure (288): n=A,T,C or G
  unsure (295): n=A,T,C or G
  unsure (303): n=A,T,C or G
  unsure (305): n=A,T,C or G
  unsure (353): n=A,T,C or G
  unsure (356): n=A,T,C or G
  unsure (371): n=A,T,C or G
  unsure (390): n=A,T,C or G
  unsure (395): n=A,T,C or G
  unsure (417): n=A,T,C or G
  unsure (437): n=A,T,C or G
  unsure (439): n=A,T,C or G
  unsure (472): n=A,T,C or G
gtacaagcttttttttttttttttttttttttttgggnattnaaagttgtattttatttttaactatccaatatnttaaactttgattacatcaaatgaaatanattgngcncactcactntaananagctntgatatatgcanaancaaaggngcagggatcatgcaatagtttcgtaccanatttcaanataccaagtancaaggaaacacaatggaattgaaggctgaggngaagtacaggcntaaggcanggaaagcanaacattcaanatgtncctatatncnccagttnttaaaacncncaaatcatttccaataaggcactggctcatgtatttctgttgaggcanaantcaatcttaggatgnggtctgtacatatctgcanataanattcacaaaagctgaattcagngttattagtccttcattcanangcttcatttttgcattttcaattgctttcctgngatat

SEQ ID NO: 7864 - DNA, 498 bp, Homo sapiens
ctggtggttaacaagtggatcgtcatgttcagtagtttatacattatgtgagaagtaacgttctgattctttttcttacacagaattggcagagggggtcgatttgggaggaaaggtgtggctataaactttgttactgaagaagacaagaggattcttcgtgacattgagactttctacaatactacagtggaggagatgcccatgaatgtggctgaccttatttaattcctgggatgagagttttggatgcagtgctcgctgttgctgaataggcgatcacaacgtgcattgtgcttctttctttgggaatatttgaatcttgtctcaatgctcataacggatcagaaatacagattttgatagcaaagcgacgttagtcgtgagctcttgtgaggaaagtcattggctttatcctctttagagttagactgttggggtgggtataaaagatggggtctgtaaaatctttctttcttagaaatttatttcctagtt

SEQ ID NO: 7865 - DNA, 198 bp, Homo sapiens
ctgaggtggtcttgcttgtcatcgtcggtgaagaaggacttgttgtggtacgtgcctcgggccagcatgcccttgggagcctcctcaactggagtgaggaactcatactcctcaggccgaggtccatagctgccaaccataaatgttgctttatccactttcaccccagtcctgtaggtgtgctgaacgtatttcagg

SEQ ID NO: 7866 - DNA, 547 bp, Homo sapiens
  unsure (479): n=A,T,C or G
  unsure (504): n=A,T,C or G
tgcaaaaccaccacctctgctgtcatggttcactgcctgcgacagaagacggaagaggagctcttggagacgacattgaaaatgaaattcttatctctggacttacagggagaccccagagagagtcaaccccttctgggcactgtgattgatgggatgctgctgctgaaaacacctgaagagcttcaagctgaaaggaatttccacactgtcccctacatggtcggaattaacaagcaggagtttggctggttgattccaatgcagttgatgagctatccactctccgaagggcaactggaccagaagacagccatgtcactcctgtggaagtcctatccccttgtttgcattgctaaggaactgattccagaagccactgagaaatacttaggaggaacagacgacactgtcaaaaagaaagacctgttcctggacttgatagcagatgtgatgtttggtgtcccatctgtgattgnggcccggaaccacagagatgctggnagcacccacctacatgtatgagtttcagtaccgtccaagcttc

SEQ ID NO: 7867 - DNA, 507 bp, Homo sapiens
  unsure (373): n=A,T,C or G
  unsure (427): n=A,T,C or G
gttggctggaagtaccaggcagtgacagccaccctggaggagaagaggaaagagaaagccaagatccactaccggaagaagaaacagctcatgaggctacggaaacaggccgagaagaacgtggagaagaaaattgacaaatacacagaggtcctcaagacccacggactcctggtctgagcccaataaagactgttaattcctcatgcgttgcctgcccttcctccattgttgccctggaatgtacgggacccaggggcagcagcagtccaggtgccacaggcagccctgggacataggaagctgggagcaaggaaagggtcttagtcactgcctcccgaagttgcttgaaagcactcggagaattgtgcangtgtcatttatctatgaccaataggaagagcaaccagttactatgagtgaaagngagccagaagactgattggagggccctatcttgtgagtggggcatctgttggactttccacctggtcatatactctgcag

SEQ ID NO: 7868 - DNA, 478 bp, Homo sapiens; identical to SEQ ID NO: 277

SEQ ID NO: 7869 - DNA, 258 bp, Homo sapiens
cagaaacatccaattctcaaactgaagctcgcactctcgcccccagcatgaaagtctctgccgcccttctgtgcctgctgctcatagcagccaccttcattccccaagggctcgctcagccagatgcaatcaatgccccagtcacctgctgctataacttcaccaataggaagatctcagtgcagaggctcgcgagctatagaagaatcaccagcagcaagtgtcccaaagaagctgtgatcttcaagaccattgtgg

SEQ ID NO: 7870 - DNA, 567 bp, Homo sapiens
ccaagaacctcttccaccgggccatttctgagagtggcgtggccctcacttctgttctggtgaagaaaggtgatgtcaagcccttggctgagcaaatttctatcactgctgggtgcaaaaccaccacctctgttgtcatggttcactgcctgcgacagaagacggaagaggagctcttggagacgacattgaaaatgaaattcttatctctggacttacagggagaccccagagagagtcaaccccttctgggcactgtgattgatgggatgctgctgctgaaaacacctgaagagcttcaagctgaaaggaatttccacactgtcccctacatggtcggaattaacaagcaggagtttggctggttgattccaatgcagttgatgagctatccactctccgaagggcaactggaccagaagacagccatgtcactcctgtggaagtcctatccccttgtttgcattgctaaggaactgattccagaagccactgagaaatacttaggaggaacagacgacactgtcaaaaagaaagacctgttcctggacttgatagcagatgtga

SEQ ID NO: 7871 - DNA, 526 bp, Homo sapiens
ccacactctacttctgcttctgccacctatggggtcgaggcaggtgtgatgccttggctaagtccacagacttctgagaggcccacgctttcttcttctccagaaataaaccctgaaactcaagcagctttaatcagagggcaggattccacgatagcagcatcagaacagcaagtggcagcgagaattcttgattccaatgatcaggcaacagtaaaccctgtggaatttaatactgaggttgcaacaccaccattttcccttctggagacttctaatgaaacagatttcctgattggcattaatgaagagtcagtggaaggcacggcaatctatttaccaggacctgatcgctgcaaaatgaacccatgccttaacggaggcacctgttatcctactgaaacttcctacgtatgcacctgtgtgccaggatacagcggagaccaatgtgaacttggtaagatggtacttggctgaaaaggtgcagttctttcacagaagatatattgggggagaatttatgttg

SEQ ID NO: 7872 - DNA, 410 bp, Homo sapiens
  unsure (13): n=A,T,C or G
  unsure (15): n=A,T,C or G
  unsure (197): n=A,T,C or G
  unsure (226): n=A,T,C or G
  unsure (253): n=A,T,C or G
  unsure (259): n=A,T,C or G
  unsure (262): n=A,T,C or G
  unsure (268): n=A,T,C or G
  unsure (335): n=A,T,C or G
  unsure (347): n=A,T,C or G
  unsure (404): n=A,T,C or G
  unsure (405): n=A,T,C or G
  unsure (407): n=A,T,C or G
cctgtttgattgnanctatgttggtgtatctcgtgtacaagatggaaaagtgcttttgttgttctacctgatccagttgggggagcaggaatagggggtgcctgcctaacggcctctagcccatgtgcttatactgggatctgtcccgagggatctgcacctggttggcagtcattttgtggtggacgtggtaaatngcgagtgttaccatgatgacgaggcccangatgagccccaaaatcaggggcaaggnttcttncanttgctnccgctcatccactgggcatttatgctcttcactgaagacaaaatctgagataatgtcaaaaggttgnatgtggaccgcncacaggatcatggtgaccgtcttctgcggatcactagaggccagtgaaatggtttgnntnagc

SEQ ID NO: 7873 - DNA, 478 bp, Homo sapiens
ccagggaactccaaattcagctaatacccaaggaaattcaacaccaaatcctcaggtccctgattaccctccaaactatattttattccttaataacttaccagaagagactaatgagatgatgttatccatgctgtttaatcagttccctggcttcaaggaagtacgtctggtaccagggaggcatgacattgcttttgttgaatttgaaaatgatggacaggctggagctgccagggatgctttacagggatttaagatcacaccgtcccatgctatgaagatcacctatgccaagaaataacatttgggatagtcgtctttaaaagacttggtgttatttacagtgtttgttttgataacatttggctgggtcattttaatagttagagatgaggaggagtaaaagtgaaatttttgtgaaggacttaaattatccagtgtttctttagccttggtgaactatgaaatacgaagg

SEQ ID NO: 7874 - DNA, 519 bp, Homo sapiens
  unsure (481): n=A,T,C or G
ccttattctttagttctctactttacagtttcccattgtcctttgaagaacacatttgggcttgctctcagactcgccaacataaatcatcatttacatatcagggcatgtgtgagttccagcagttcactgaaataaaatccctgagccttaaccctcccatctcaaatacagtgaaaatttattttaatgataatgatggtaattttttatttgacactttttataatgctgatgttaaagtcaagaagcatttctctgtaatggaaaaaatgtctcatttttcttcctactgggcggtcagaagttggattttagaaaaaatatattgaatagggattataccgccttccttccttaaacctcataaagcaatggagtaggtggataagaagaaatagaaccaatttctggaaacaactttggagtaatgatcatagaagttacagatatccaagaatgcctaaagaaatatatctgnccttccatacccacgacacacaaataggatttatagtt

SEQ ID NO: 7875 - DNA, 474 bp, Homo sapiens
  unsure (9): n=A,T,C or G
  unsure (356): n=A,T,C or G
  unsure (362): n=A,T,C or G
  unsure (363): n=A,T,C or G
ctgtattanagggaatacacattttaattgctctttttgaaaatatcaccaggcagttcagaatgtctcatttattgagaatattgtgacaatcaaagaccttaatatcagccagatgctaacaattgggaatagggcagaatttaataatggaatgtatgggattctcatttttactcaatcttgaatcatctgagaatgttttctattcaagccagtatttttagataaacacagatatagatatcgctactttgaaaaaaatcacttattttaaactcagaatttcttagtactaaatgctaaccaatacacattttatacataatatgtacagactttgttaccaagcgccncacaannaggacaaacatattagttaccttggttttcaaaggttgtcaactctgcatattgtgtggcaaggagatactatcaacatttttttttgcataatgtgcaagtattatatgg

SEQ ID NO: 7876 - DNA, 384 bp, Homo sapiens
cctctctcacctctcctactcacttaaagcccgcctgacagaaaccacggccacatttggttctaagaaaccctctgtcattcgctcccacattctgatgagcaaccgcttccctatttatttatttatttgtttgtttgttttattcattggtctaatttattcaaagggggcaagaagtagcagtgtctgtaaaagagcctagtttttaatagctatggaatcaattcaatttggactggtgtgctctctttaaatcaagtcctttaattaacactgaaaatatataagctcagattatttaaatgggaatatttataaatgagcaaatatcatactgttcaatggttctgaaataaacttcactgaaaaaaaaaaaaaaaa

SEQ ID NO: 7877 - DNA, 564 bp, Homo sapiens
ctcaagaggctgaggcaggagaattgcttaaatctgggaggcggaagttgcagtgagccaagatcgcgccactgaactccagcctaggcaacaagagcaaaactccatctccaaaaaaaagaaaggaaaaacagggccaggtagccattgtggagagagcacacttaggaatcctgggatgttagtgttaaaagaaagctcctggagccagtgattctcaggtttgtcccagaacccttttttctaagccccatataaaaggtagattaaaaaaacaaagtagcatgagtgaaattgagagagggacaggtaatgcctttcagcccctaacttctaacaatctggaagcacaacgtgaaaatcacgtagcccaaccctatcattttcatattatgaaactgagtccaggtaagtgaatctgtccaaggtcacccagcaaggtatcagtagccctgagggtaaggactctgataaggctcgggagggtcctggaaagcctgaggcggcaggaagagtgtgcagagttgagcgtgtctggaaggctgatccactgctgggcccaca

SEQ ID NO: 7878 - DNA, 424 bp, Homo sapiens
gattttgataagcatcatcatatttagtgttatcagcaaagacacaagctcaaaagtgacatcttttccatgaatccaggaaagaagaaaaatccactcagttcagataaatcctagcaattcccaaagggaaaggcattggatatgtgtttgatgagaaagaaaatgaaaaaggggtggggtggtagtactcttctacctgcttctcaaaaccagaacattgctcggtcagattaaacccagtgaaaaacacttacaataaccagtatacagcatgttttcccacagcttatttggaaaaaaagacaggtaacagtcaaagttagagaagctgtaagcaatggacaggcttgatattaagtgtgcaggatctgggctaaatgccttaaaatgtgcaattcaactttccacttctgaatgtgga

SEQ ID NO: 7879 - DNA, 479 bp, Homo sapiens
  unsure (38): n=A,T,C or G
  unsure (331): n=A,T,C or G
  unsure (386): n=A,T,C or G
  unsure (387): n=A,T,C or G
ccaccaacagtttcccagccacatgctgggccctctangtctctccagcccactctaaggacccaagaaatgcagccacagtccatctctcttttttctctccttccgggggaccaaggtaccttctggggcatacaacatggcagcagggcctcgggaagaggggtaggaggaccgagcagcattctctgtagaggaagacaggaaaggagaccctcttggcacacatttatggagggttgtccctgaagagaagggcaggtgggagaggttccctgttacttaagagaaggcaccagtggcaaagagcacaatgaagaggatgatgatnaaaacaatcacgcagataaggacaatcatcttcacgttcttccaccagaattttnngagccaccttctgcgatgtcgtcttgaagtgctcagatgtggcttccagatcctctgtcttgttgcggagatgttccaagttttccccccgg

SEQ ID NO: 7880 - DNA, 490 bp, Homo sapiens
ctggctgtggatcaacttttttcagagaccttggcgataaagggctaatttcatataccgagtatcttttcttgcttacaatcctcactaaaccccattctggatttcatgttgcttttaaaatgctggatacagatggtaatgagatgattgaaaaaagggaattttttaagctgcagaagatcataagtaaacaagatgacttgatgacagtgaaaactaatgaaactggatatcaggaagcaatagtgaaagaacctgaaattaacacaactcttcagatgcgtttctttggaaaaagaggacaaagaaaacttcattataaagaatttcgaagatttatggaaaatttacaaacagagattcaagaaatggaattccttcagttttctaaaggtttgagtttcatgagaaaagaagactttgcagagtggctactttttttcactaacactgaaaataaagatatttattggaaaaatgtgagaga

SEQ ID NO: 7881 - DNA, 309 bp, Homo sapiens
  unsure (10): n=A,T,C or G
  unsure (14): n=A,T,C or G
  unsure (218): n=A,T,C or G
  unsure (302): n=A,T,C or G
  unsure (306): n=A,T,C or G
cctgtttgantgtngctatgttggtgtatctcgtgtacaagatggaaaagtgcttttgttgttctacctgatccagttgggggagcaggaatagggggtgcctgcctaacggcctctagcccatgtgcttatactgggatctgtcccgagggatctgcacctggttggcagtcattttgtggtggacgtggtaaatcgcgagtgttaccatgatgacnaggcccaagatgagccccaaaatcaggggcaaggtttcttccagttgctcccgctcatccactgggcatttatgctcttcactnaagncaa

SEQ ID NO: 7882 - DNA, 498 bp, Homo sapiens
tccggataggccgagaaagtgttgtgggaagaaagttagatttacgccgatgaatatgatagtgaaatggattttggcgtaggtttggtctagggtgtagcctgagaataggggaaatcagtgaatgaagcctcctatgatggcaaatacagctcctattgataggacatagtggaagtgggctacaacgtagtacgtgtcgtgtagtacgatgtctagtgatgagtttgctaatacaatgccagtcaggccacctacggtgaaaagaaagatgaatcctagggctcagagcactgcagcagatcatttcatattgcttccgtggagtgtggcgagtcagctaaatactttgacgccggtggggatagcgatgattatggtagcggaggtgaaatatgctcgtgtgtctacgtctattcctactgtaaatatatggtgtgctcacacgataaaccctaggaagccaattgatatcatagctcagaccatacctatgta

SEQ ID NO: 7883 - DNA, 556 bp, Homo sapiens
ctgggaagccacgagaatattgtgaacctgctgggggcgtgcacactgtcaggaccaatttacttgatttttgaatactgttgctatggtgatcttctcaactatctaagaagtaaaagagaaaaatttcacaggacttggacagagattttcaaggaacacaatttcagtttttaccccactttccaatcacatccaaattccagcatgcctggttcaagagaagttcagatacacccggactcggatcaaatctcagggcttcatgggaattcatttcactctgaagatgaaattgaatatgaaaaccaaaaaaggctggaagaagaggaggacttgaatgtgcttacatttgaagatcttctttgctttgcatatcaagttgccaaaggaatggaatttctggaatttaagtcgtgtgttcacagagacctggccgccaggaacgtgcttgtcacccacgggaaagtggtgaagatatgtgactttggattggctcgatatatcatgagtgattccaactatgttgtcaggggcaatgcccgtctgcctgtaa

SEQ ID NO: 7884 - DNA, 289 bp, Homo sapiens
  unsure (9): n=A,T,C or G
  unsure (13): n=A,T,C or G
  unsure (281): n=A,T,C or G
ctgggaggnaaanggtgactgtatttccaaagaagctcttttgattcagaactccaggagaccctgacatgaaaaccttaaagcaaatgactgtcacatgcttcaaggagtttatgtcaagacagttctacttatgtaaagtaagattataaaatgaaagagagtgtataaagaaaatcctaaggaatccactaaaaaacaactagaacgaagaggcaagttcagcaaggttgcaagatacaagacctatatataaaaatcaattgcatttctgtacactngtaataaa

SEQ ID NO: 7885 - DNA, 458 bp, Homo sapiens
ccttatttctcttgtcctttcgtacagggaggaatttgaagtagatagaaaccgacctggattactccggtctgaactcagatcacgtaggactttaatcgttgaacaaacgaacctttaatagcggctgcaccattgggatgtcctgatccaacatcgaggtcgtaaaccctattgttgatatggactctagaataggattgcgctgttatccctagggtaacttgttccgttggtcaagttattggatcaattgagtatagtagttcgctttgactggtgaagtcttagcatgtactgctcggaggttgggttctgctccgaggtcgccccaaccgaaatttttaatgcaggtttggtagtttaggacctgtgggtttgttaggtactgtttgcattaataaattaaagctccatagggtcttctcgtcttgctgtgttatgcccgcctcttcacg

SEQ ID NO: 7886 - DNA, 381 bp, Homo sapiens
  unsure (327): n=A,T,C or G
gggattacaggtgcatgccatcacgcctggctaattttttgtatttttagacgagacagggtttcaccctgttggccaggctggtctcaaactcctaacctcaggtgatccaactgcctcggcctcccaaagtgctgggattacaggtatgagccaccgtgcccagcagaattttttaactatttggttacgactaatttggataatgtagtgcatgcagctttgatttgtgccactaagagtgggcaaactgtcttcctttttgtgaatcagtaaaaattttccctcaacatgtgtttgacagttgtcattcactgctaagttaangcatttggtaaaccacacagcctctgcatccttcctagcgacagccacaagaaa

SEQ ID NO: 7887 - DNA, 581 bp, Homo sapiens
  unsure (520): n=A,T,C or G
  unsure (544): n=A,T,C or G
  unsure (552): n=A,T,C or G
ccatttaaaacaaagaaaaatactaaagccactagtaaacatctgatgtgcaaaatacaacatcctctagttggctttatgccattattacataagctccaaatagctcatcttaaattaaaaagaaaaagtggctgtcccatctctgctgcataaatcagatttttttttaaaggtttagagtactttaaggaagggaagttcaaaactgccagtgaaattcacagagaatacaaatttagcaatttaatttcccaaagctctttgaagaagcaagagagtctctcttcttaatgcagtgttctcccaagaggaactgtaattttgcttggtacttatgctgggagatatgcaaaatgtgtttttcaatgtttgctagaatataatgtttcctcttcagtgtctgtttcatcctggaactcatggcttaggagggacttcttggagccggtagacatcatgcgaatttcatcttcatactcatcatgatgctgcctgagccgatgaaagccatccttgngtctattagacttgattgagcagnatgcaccnaaataatgcaagctgttaggatcaatgcc

SEQ ID NO: 7888 - DNA, 357 bp, Homo sapiens
  unsure (345): n=A,T,C or G
  unsure (346): n=A,T,C or G
ccttattttttgaacaattgagcaaaagaaacagatgaaacctcatacaaaaccctccaaaatatgaaaatgtggggtttatttgtgctaatgctcttcttttggaaacatttgtgttaaaggatcttatggttggtgatgaggcaagtgaattacgatcaatgttagaagttaactaccctatggaaaatggcatagtacgaaattgggatgacatgaaacacctgtgggactacacatttggaccagagaaacttaatatagataccagaaattgtaaaatcttactcacagaacctcctatgaacccaaccaaaaacagagagaagattgtagaggtaatgnntgaaacttacc

SEQ ID NO: 7889 - DNA, 178 bp, Homo sapiens
  unsure (70): n=A,T,C or G
  unsure (71): n=A,T,C or G
  unsure (73): n=A,T,C or G
  unsure (83): n=A,T,C or G
  unsure (87): n=A,T,C or G
  unsure (88): n=A,T,C or G
  unsure (121): n=A,T,C or G
  unsure (124): n=A,T,C or G
  unsure (143): n=A,T,C or G
  unsure (157): n=A,T,C or G
  unsure (165): n=A,T,C or G
aattcattttatagaaagatttaaagtttttttctggaagtgatatatgtcaaattacatttcctactgnngnatttgagcangganngtcattttttaaatgtttttggccgggcgtggnggntcatgcctgtaatctcagnacattgggaggccnaggcaggnggatcacctgagg

SEQ ID NO: 7890 - DNA, 146 bp, Homo sapiens
ctgtccttccctttcagctttccaaacatgagcacagaaggtgtctagtctgggtgaccaaagtcctcaaacggcagccggtcaacacatcgtcttcctcgttaaccatgtcatcaggtggttccacacagcacagacatggctga

SEQ ID NO: 7891 - DNA, 454 bp, Homo sapiens
  unsure (323): n=A,T,C or G
  unsure (397): n=A,T,C or G
acgctttcttcttctccagaaataaaccctgaaactcaagcagctttaatcagagggcaggattccacgatagcagcatcagaacagcaagtggcagcgagaattcttgattccaatgatcaggcaacagtaaaccctgtggaatttaatactgaggttgcaacaccaccattttcccttctggagacttctaatgaaacagatttcctgattggcattaatgaagagtcagtggaaggcacggcaatctatttaccaggacctgatcgctgcaaaatgaacccgtgccttaacggaggcacctgttatcctactgaaacttnctacgtatgcacctgtgtgccaggatacagcggagaccagtgtgaacttgattttgatgaatgtcactctaatncctgtcgtaatggagccacttgtgttgatggttttaacacattcaggtgcctctgcc

SEQ ID NO: 7892 - DNA, 578 bp, Homo sapiens
  unsure (545): n=A,T,C or G
  unsure (560): n=A,T,C or G
ctgagggacctgactgttagaaggaaaactaacaaacagaaaggagtagcatcaacatcaacaaaaaggacatccacaacaaaacctcatctgtaggtcaccaacatcagagaccaaaggtagataaaaccacaaaggtggggagaaaccagagcagaaaagctgaaaattctaaaaactggagcacttcttctcctccaaaggattgcagctccttgccagcaacggaacaaagctggatggagaatgactttgacgagctgacagaagtaggcttcagaaggtcggcaataacaaacttttctgagctaaaggcagatgttcaaacccatcgcaaggaagctaaaaaccttgaaaaaagattagacgaatggctaactagaataaacagcgtagagaagaccttaaatgatctgatggagctgaaaaccatggcatgagaactacgtgacacatgcacaagcttcaatagccgattcgatcaagtggaagaaagggtatcagtgattgaagatcaaattaatgaaataaagtaagagagaagnttagagaaaaaagtnaaaagaaacaaacaaagc

SEQ ID NO: 7893 - DNA, 462 bp, Homo sapiens
  unsure (245): n=A,T,C or G
  unsure (289): n=A,T,C or G
cgcgtgctggtggtcttggcatcaatcttgcgactgctgatgtagtaattttgtatgattctgattggaatccccaagtagatcttcaggctatggaccgagcacatagaattgggcagactaagacagtcagagtgttccgctttataactgataacactgtagaagaaagaatagtagaacgtgctgagatgaaactcagactggattcaatagccattcaacaagggaggcttgtggatcanaatctgaacaaaattgggaaagatgaaatgcttcaaatgattanacatggagcaacacatgtgtttgcttcaaaggaaagtgagatcactgatgaagatatcgatggtattttggaaagaggtgcaaagaagactgcagagatgaatgaaaagctctccaagatgggcgaaagttcacttagaaactttacaatggatacagagtcaagtgtttata

SEQ ID NO: 7894 - DNA, 545 bp, Homo sapiens
  unsure (453): n=A,T,C or G
  unsure (475): n=A,T,C or G
  unsure (482): n=A,T,C or G
ccatagtaaataatgattatttatttgcaaagagaagacagagataacaatagcaataataataatgtatttcaaacaattaagagtaaatttcaaatgcctcaccacaaaatataagtaagcaaagtaaggcgatagtatgttaattagtatgatttaatcatactacattacacacatatatataaacattacgttgtaccctatgtgtacaattatgatttctgaattaatattagagtggggagaacaataatgattaatttttacttcttcagtaagattacaatgaaaatgtagagagcactagcattatagtaactatacgataggccactttaaataaatggcatcttttacaaaatttttagtcaataagttgattacgacatacttacgaactatttgctattaagtgtaagttaatttataattttagtattttcaaaaaangaacatattaaaatcctatcantatttcnaataatgacaaaattaatcatttttaatagaatccttactcaggtcctccaaaaacaatataa

SEQ ID NO: 7895 - DNA, 243 bp, Homo sapiens
cctctttttaccagctccgaggtgattttcatattgaattgcaaattcgaagaagcagcttcaaacctgccggggcttctcccgccttttttcccggcggcgggagaagtagattgaagccagttgattagggtgcttagctgttaactaagtgtttgtgggtttaagtcccattggtctagtaagggcttagcttaattaaagtggctgatttgcgttcagttgatgcagagtggggttttg

SEQ ID NO: 7896 - DNA, 341 bp, Homo sapiens
agatgtgcaaggatgtctgtgaagccatggaatacctggagtcaaagcagttccttcaccgagacctggtgggaccttagaaggattggcctaggacaaagggctgatggggtggaagtagcagtggaagatatatcatacatggttgaggggggctgctggtgccatcatttcaattttatctagaaagtactataagttaggcgtgcctctgccccagtgctgagcccatcaaatatctccagcctcagctccatgaagtctgccgtggtgggaatcagagcagtcactcactcccaaccccctaccacccacaagaaaatggtggggtctttcagtgg

SEQ ID NO: 7897 - DNA, 475 bp, Homo sapiens
  unsure (263): n=A,T,C or G
gttgggtgccggtggagtcgtgttggtcctcagaatccccgcgtagccgctgcctcctcctaccctcgccatgtttcttacccggtctgagtacgacaggggcgtgaatactttttctcccgaaggaagattatttcaagtggaatatgccattgaggctatcaagcttggttctacagccattgggatccagacatcagagggtgtgtgcctagctgtggagaagagaattacttccccactgatggagcccagcagcattnagaaaattgtagagattgatgctcacataggttgtgccatgagtgggctaattgctgatgctaagactttaattgataaagccagagtggagacacagaaccactggttcacctacaatgagacaatgacagtggagagtgtgacccaagctgtgtccaatctggctttgcagtttggagaagaagatgcagatccaggtgccatgtctcgt

SEQ ID NO: 7898 - DNA, 250 bp, Homo sapiens
ccatcacaagaaaatgtaaggctgatgatgggcttatttgatttgggaaatgtaatttctctcacaggctttaagtcccatgtgctccataaccttacaattccattttctaatcccccagcgattacattgatagatactccctcaggctggttggagaaagccacggaacagatgatctccctgcagtggacatgtccaacgagatccccgttcaccgtccagagtctgaggtcactgcctccgccag

SEQ ID NO: 7899 - DNA, 470 bp, Homo sapiens
  unsure (374): n=A,T,C or G
  unsure (381): n=A,T,C or G
  unsure (422): n=A,T,C or G
  unsure (440): n=A,T,C or G
  unsure (467): n=A,T,C or G
ccactagaggtctgtgtgccattgcccaggcagagtctctgcgttacaaactcctaggagggcttgctgtgcggagggcctgctatggtgtgctgcggttcatcatggagagtggggccaaaggctgcgaggttgtggtgtctgggaaactccgaggacagagggctaaatccatgaagtttgtggatggcctgatgatccacagcggagaccctgttaactactacgttgacactgctgtgcgccacgtgttgctcagacagggtgtgctgggcatcaaggtgaagatcatgctgccctgggacccaactggtaagattggccctaagaagcccctgcctgaccacgtgagcattgtggaacccaaagatganatactgnccaccacccccatctcagaacagaagggtgggaagccaganccgcctgccatgccccanccagtccccacagcataacagggtctnctt

SEQ ID NO: 7900 - DNA, 368 bp, Homo sapiens
  unsure (287): n=A,T,C or G
  unsure (288): n=A,T,C or G
ccatgtaaataagatgatttaatgttgattttaatcctgtatataaaataaaaagtcacaatgagtttgggcatatttaatgatgattatggagccttagaggtctttaatcattggttcggctgcttttatgtagtttaggctggaaatggtttcacttgctctttgactgtcagcaagactgaagatggcttttcctggacagctagaaaacacaaaatcttgtaggtcattgcacctatctcagccataggtgcagtttgcttctacatgatgctaaaggctgnnaatgggatcctgatggaactaaggactccaatgtcgaactcttctttgctgcattcctttttcttcacttacaagaaagg

SEQ ID NO: 7901 - DNA, 363 bp, Homo sapiens
  unsure (9): n=A,T,C or G
  unsure (23): n=A,T,C or G
  unsure (29): n=A,T,C or G
  unsure (74): n=A,T,C or G
ccatcacancttctcaagtcagntaagtnagacagaactgcagaggtagaagtagaagggaactcagattcttnctcagctagggtagaatccttggaacagtggaggtctttaaattctttacaatcgtcatatctaccattgttggactgttcttctgcatgctgtgacctgatatttgacatgtcttctgaaaacgaagatggaacttccattcggtattctttaacagaactattttcaggggaaggaagatcttgctcagttcctggatcaataattgaggagtctctggtctcattgtcagaagtgctcgttggggtcaggacctccctggtttctgttttcatgtcactgatgcag

SEQ ID NO: 7902 - DNA, 450 bp, Homo sapiens
  unsure (289): n=A,T,C or G
ctgccatctgggcatttgcaatgtccatgcatactcttgaagcagcattcaattctgttcccccttttcaatgtatggttcatggggtttggtatcttgataggactaaggaaggggaagctgtcataaaccaggaagggaaatatttaattggaaagaacaaggctgttcattcaaattgcatttcctacagatttatccaataatggacaagtcaagccgcacacgtcttgctctcattatctgcaatgaagaatttgacagtattcctagaagaactggagctgangttgacatcacaggcatgacaatgctgctacaaaatctggggtacagcgtagatgtgaaaaaaaatctcactgcttcggacatgactacagagctggaggcatttgcacaccgcccagagcacaagacctctgacagcacgttcctggtgttcatgtctca

SEQ ID NO: 7903 - DNA, 481 bp, Homo sapiens
  unsure (2): n=A,T,C or G
  unsure (36): n=A,T,C or G
  unsure (38): n=A,T,C or G
  unsure (44): n=A,T,C or G
  unsure (48): n=A,T,C or G
  unsure (50): n=A,T,C or G
  unsure (121): n=A,T,C or G
  unsure (123): n=A,T,C or G
  unsure (358): n=A,T,C or G
  unsure (406): n=A,T,C or G
  unsure (463): n=A,T,C or G
tntcaaggaagagaaagtaaagggtctccaaagaancngctggntgtncntctgtcgagaacgtccagcgtggagcggggcaaggagagggaggaggcttggagctttgacggggcattgnanaacaagcgaactgccgctaaggaatctgaggagaacaaggagaacctgatcataaattctgaactcaaagacgacttgcttttgtatcaggacgaggaggcgctgaacgactccattatttctggaacactgccacggaaatgcaagaaggagctcctggccgtgaagctaaggaaccggccaagcaaacaggaactagaagaccggaacattttccccagaaggactgatgaanaaagacaggagatccggcagcagatcgagatgaagctttccaaacggntgagccaaagacctgccgtggaagagctggagagaagaaatatcttgaaacaaaggnatgatcagacagagcagg

SEQ ID NO: 7904 - DNA, 532 bp, Homo sapiens
  unsure (456): n=A,T,C or G
  unsure (470): n=A,T,C or G
  unsure (497): n=A,T,C or G
cctagcccaactctccagaaaccaggggtagcctgctgagctctgaaatgccagaagtttaagaaaagagggaagggggcaagaggtggtggtggtagtggtactttgctatttaaaggtagaagaatgcaaggaagtaaaactttttttctccatttgttgtttggcgaccccattggagaattccaggaggcatgcaggatgacatcatgttttacaactgagaaatctcagtaattctgtaaaatggagtccctgcctgctccatgttcctgatggaagctgctttatatttatgtgcttaaagctgtattttatgtcacatttaaatgagggtttaataatcttaattatctaccaaaagtagattacgacgcatgaagatcacataaaatgaacttcacttctcagcatcacaaacatttggaatacaaaaagtccagggatggatattanaagtaagaaaagtncaaaagaggtttgcttagaaataacanaaaattaaaaaaaaaaaacggatcccccctccccc

SEQ ID NO: 7905 - DNA, 346 bp, Homo sapiens
cctggattagaagtgcgtaaacctctgtccatcttccttggccctgtggagctgcctgggaacattccatgattaactctcgtggcgtcctgggacgaccaggtgagcgataccatgtggcacctgggaacctgacgtacctttagatttccgaccatctccctgctgtggtgtctgaggaactgtgcctgggctcaagggctgaacttttgaatacagagtaagaagttttagaaagataaactcctggggaaatgggatcttttaaatccatgtaatttttaaagcagtttttttgcgggggggggcggtggtttgagataggttcttgccctgtggcccaagc

SEQ ID NO: 7906 - DNA, 198 bp, Homo sapiens
  unsure (197): n=A,T,C or G
gacaaattgaaccatatgtaagtaatcttttattttttattttttttttgagacagagtctcactctgtcacccaggctggagtgcagtggcgcgatcttggctctctgcaacctctgcctcccaggttcaagcctcctgagtaactgggactacaggcgtgcaccactacgcccaactaatttttttttttttttna

SEQ ID NO: 7907 - DNA, 394 bp, Homo sapiens
  unsure (243): n=A,T,C or G
  unsure (268): n=A,T,C or G
  unsure (365): n=A,T,C or G
ggcaagttctcccaggagaaagccatgttcagttcgagcgccaagatcgtgaagcccaatggcgagaagccggacgagttcgagtccggcatctcccaggctcttctggagctggagatgaactcggacctcaaggctcagctcagggagttgaatattacggcagctaaggaaattgaagttggtggtggtcggaaagctatcataatctttgttcccgttcctcaactgaaatctttccanaaaatccaagtccggctagtacgcnaattggagaaaaagttcagtgggaagcatgtcgtctttatcgctcagaggagaattctgcctaagccaactcgaaaaagccgtacaaaaaataagcnaaagcgtcccaggagccgtactctgacag

SEQ ID NO: 7908 - DNA, 486 bp, Homo sapiens
  unsure (75): n=A,T,C or G
  unsure (77): n=A,T,C or G
  unsure (383): n=A,T,C or G
  unsure (448): n=A,T,C or G
  unsure (468): n=A,T,C or G
gtctggtatagattcagttactaatgcagtagctaagaaaaaatgtgacttttcagtagcttcagggagagttgngnaagattccaagccatttgcatctggatctggagtagacatgttaactaaagaagtgtcttcctccttcatttctttatcatcactgtaagttttctttgttgttagtacagaataatctgtggttttgagttcagtttcagtaaatgtctgtgaatcaaagattgtttgttctgttgcaggagagttttgaggggattcaaatgacttttcttcttgaatttgttcctctgatgttgtttcactttcaatttcttgtcttacagggttgacttcttgcctagaccataatttggctggctctatantttggggaaagtttgttgaaactgtgccactgacctttacttcctccttctctactggagctttngtaccttccacttctgctgntggtaaaatggtggatct

SEQ ID NO: 7909 - DNA, 550 bp, Homo sapiens; identical to SEQ ID NO: 607
  unsure (20): n=A,T,C or G

SEQ ID NO: 7910 - DNA, 466 bp, Homo sapiens
  unsure (49): n=A,T,C or G
  unsure (53): n=A,T,C or G
  unsure (69): n=A,T,C or G
  unsure (90): n=A,T,C or G
  unsure (125): n=A,T,C or G
ccaggaactgctttcccataggagggccaagtttgcaaaagcggggctntttncttgggcccctccatntctgggaggacagcttctttnctgcgtgatccctgcccctgccttgatagcagctnctggctggcaggagaccatccttcactggaaacccaaagcgcccataaaagacttcctttttcacattgccaaaacttaattttataattgtctgacttacaccactgggcacatctgctaagcttgtgtgccttctagacatataaaaggctactgtgataccattaaatatcagcagtgtgctttgctgtgctttgagtttataagggtgaaaggtgattgtgcaggaaaatgggacagtatatttgctgtgagacaggcaccaagacttcactcccatactcagttataattcatgacagtactggtgggaagcccttatccctctgtggagttaatg

SEQ ID NO: 7911 - DNA, 308 bp, Homo sapiens
  unsure (10): n=A,T,C or G
  unsure (13): n=A,T,C or G
  unsure (26): n=A,T,C or G
  unsure (44): n=A,T,C or G
  unsure (53): n=A,T,C or G
  unsure (147): n=A,T,C or G
  unsure (150): n=A,T,C or G
  unsure (151): n=A,T,C or G
  unsure (172): n=A,T,C or G
  unsure (239): n=A,T,C or G
  unsure (291): n=A,T,C or G
  unsure (301): n=A,T,C or G
aatgccctcngtnacacagaggctgngagatcctgacataaatncttgtttgncggaatctgatgcttccaccagatgtctggatgaaaataactatgacagggaaaggtgttccacttacttcttgaggtacaaaaactgccgganatnntggaattctatcgtgatgcanagaagaaagaacggagtgaagccatttatgcctacggcagcagaaagagatgaaatcttgagagcantgggaaatatgccctattgaatgtttgcattaaaagtgtttatataacttanaaaaaaaaanaaaaaaa

SEQ ID NO: 7912 - DNA, 233 bp, Homo sapiens
  unsure (11): n=A,T,C or G
  unsure (14): n=A,T,C or G
  unsure (37): n=A,T,C or G
  unsure (84): n=A,T,C or G
  unsure (108): n=A,T,C or G
  unsure (120): n=A,T,C or G
  unsure (121): n=A,T,C or G
  unsure (132): n=A,T,C or G
  unsure (134): n=A,T,C or G
  unsure (135): n=A,T,C or G
  unsure (156): n=A,T,C or G
  unsure (158): n=A,T,C or G
  unsure (199): n=A,T,C or G
  unsure (201): n=A,T,C or G
  unsure (220): n=A,T,C or G
caagagccagnaanaaaccaccggaaggaaccatctnactgtgtgtaaacatgacttccaagctggccgtggctctcttggcanccttcctgatttctgcagctctgngtgaaggtgcanntttgccaaggnanntgctaaagaacttagatgtcngngcataaagacatactccaaacctttccaccccaaatttatnanagaactgagagtgattganagtggaccacact

SEQ ID NO: 7913 - DNA, 569 bp, Homo sapiens
  unsure (491): n=A,T,C or G
ctgagggctcaggtgagcaactggtcacagtcagcagctctgttgttccagtgcttcccagtgctgtgcaaaagttttctggtacagcttcctccattatcgacgaaggattgggagaagtgggtactgtcaatgaaattgatagaagatccaccattttaccaacagcagaagtggaaggtacgaaagctccagtagagaaggaggaagtaaaggtcagtggcacagtttcaacaaactttccccaaactatagagccagccaaattatggtctaggcaagaagtcaaccctgtaagacaagaaattgaaagtgaaacaacatcagaggaacaaattcaagaagaaaagtcatttgaatcccctcaaaactctcctgcaacagaacaaacaatctttgattcacagacatttactgaaactgaactcaaaaccacagattattctgtactaacaacaaagaaaacttacagtgatgataaagaaatgaangaggaagacacttctttagttaacatgtctactccagatccagatgcaaatggcttggaatcttacacaactctccct

SEQ ID NO: 7914 - DNA, 564 bp, Homo sapiens; identical to SEQ ID NO: 608

SEQ ID NO: 7915 - DNA, 373 bp, Homo sapiens
  unsure (124): n=A,T,C or G
  unsure (230): n=A,T,C or G
ccaaaagaagtaagacagcttgctgaagatttcctgaaagactatattcatataaacattggtgcacttgaactgagtgcaaaccacaacattcttcagattgtggatgtgtgtcatgacgtanaaaaggatgaaaaatttattcgtctaatggaagagatcatgagtgagaaggagaataaaaccattgtttttgtggaaaccaaaagaagatgtgatgagcttaccanaaaaatgaggagagatgggtggcctgccatgggtatccatggtgacaagagtcaacaagagtgtgactgggttctaaatgaattcaaacatggaaaagctcctattctgattgctacagatgtggcctccagagggctagatg

SEQ ID NO: 7916 - DNA, 516 bp, Homo sapiens
  unsure (382): n=A,T,C or G
  unsure (417): n=A,T,C or G
  unsure (441): n=A,T,C or G
  unsure (498): n=A,T,C or G
ctgcacatggattggttaacataatatatactgctatataatcttttaagggctaatatttgtagataatttaaaagcatgtcaatttcctctaagatttgattatttaacctgcacaaaggccaatcttcagttatcaatgacaagaaaactctagggctgccaaaataacttcattttagaccccagagttagtgttaggctggtaatgtttctaatttgggaataatgagactagaaagctaggagggccccctccaaatttctcccttgtattaggctgaagtagaacataacgtggcttaaagcataaacttaaagcatatgctttgagttttaaaaatgttaacctgtaattaattattagagtattatccatagnctactatgatagtcagttaatattctctaaatcanattatattcatttgaaaatgcatntgcatatttgcaaatgtgttattacacaagatcttacctatgtcaatttaaagaggntaaagatgcaggaagtcc

SEQ ID NO: 7917 - DNA, 499 bp, Homo sapiens
ctagaatgtgatatttgaagcatcacataaaaatgatgggacaataaattttgccataaagtcaaatttagctggaaatcctggatttttttctgttaaatctggcaaccctagtctgctagccaggatccacaagtccttgttccactgtgccttggtttctcctttatttctaagtggaaaaagtattagccaccatcttacctcacagtgatgttgtgaggacatgtggaagcactttaagttttttcatcataacataaattattttcaagtgtaacttattaacctatttattatttatgtatttatttaagcatcaaatatttgtgcaagaatttggaaaaatagaagatgaatcattgattgaatagttataaagatgttatagtaaatttattttattttagatattaaatgatgttttattagataaatttcaatcagggtttttagattaaacaaacaaacaattgggtacccagttaaattttcattt

SEQ ID NO: 7918 - DNA, 555 bp, Homo sapiens
ctgaaggtttttttattctttctttttttaaagtgagcccatgatttggtgtctttcccagattatcccctttgcgacaacacaagcaaaaatatttacaaaggtaaggcatagtcaaactacataaagagaaaaaatcatgaggaaaatacatgaaaaagactaaagacttcgccataacaaggtcttagtgataatagtgtccgtaaagatgtcatcagaattggtaaagtcaagcatgctgcaaatataccctttggattagaaaagagcacaattttctttttttgttttgttctgttttaagaagtggcatactgctctttctccctttggataatttcttttaagcccatcaaaggaaaaaacaaacacaattcaaacaaacactgtcaagtgattcaagatcaaatatttacaataatcaaatggagtatcagatttttttttccaaactgataccacaaatacagagctgaaatctctctttggctcctctatatgcaaaattgaattagtcttcattgaagacaattatatagtcagttccagatg

SEQ ID NO: 7919 - DNA, 545 bp, Homo sapiens
  unsure (533): n=A,T,C or G
ccaaaaaaatcaagatttaatttttttatttgtactgaaaaactaatcataactgttaattctcagccatctttgaagcttgaaagaagagtctttggtattttgtaaacgttagcagactttcctgccagtgtcagaaaatcctatttatgaatcctgtcggtattccttggtatctgaaaaaaataccaaatagtaccatacatgagttatttctaagtttgaaaaataaaaagaaattgcatcacactaattacaaaatacaagttctggaaaaaatatttttcttcattttaaaacttttttttaactaataatggctttgaaagaagaggcttaatttgggggtggtaactaaaatcaaaagaaatgattgacttgagggtctctgtttggtaagaatacatcattagcttaaataagcagcagaaggttagttttaattatgtagcttctgttaatattaagtgttttttgtctgttttacctcaatttgaacagataagtttgcctgcatgctggacatgcctcanaaccatgaatag

SEQ ID NO: 7920 - DNA, 584 bp, Homo sapiens
gagaattcataaaaaaattcattctctgtggtatccaagaatcagtgaagatgccagtgaaacttcaagcaaatctacttcaacacttcatgtattgtgtgggtctgttgtagggttgccagatgcaatacaagattcctggttaaatttgaatttcagtaaacaatgaatagtttttcattgtaccatgaaatatccagaacatacttatatgtaaagtattatttatttgaatctacaaaaaacaacaaataatttttaaatataaggattttcctagatattgcacgggagaatatacaaatagcaaaattgaggccaagggccaagagaatatccgaactttaatttcaggaattgaatgggtttgctagaatgtgatatttgaagcatcacataaaatgatgggacaataaattttgccataaagtcaaatttagctggaaatcctggatttttttctgttaaatctggcaaccctagtctgctagccaggatccacaagtccttgttccactgtgccttggtttctcctttatttctaagtggaaaaagtattagccaccatcttacctcacagtgat

SEQ ID NO: 7921 - DNA, 116 bp, Homo sapiens
ccaacgtggatggagatgcactcacgcatggttgctgcttcgcgactgccgagctgatggcggagacgaagaggagaggttgttgcttcttacagcgcgactcttaggcggtcgat

SEQ ID NO: 7922 - DNA, 260 bp, Homo sapiens
  unsure (31): n=A,T,C or G
  unsure (51): n=A,T,C or G
  unsure (111): n=A,T,C or G
  unsure (114): n=A,T,C or G
attgaatgcagactctaaggctccatggcancagttcatattatgcaacancatgaatggagggtcatagcgtcttcatgtcacttgggtagtaagattggcacagtttanaanagcaagaaaatgctgaaatctcttcatcagtaggctactacgtactctgtgacgctactgccttttcagaacacttattaaaaatttgactagagcagcagctctggactagactgtttcagaatgtttgtgcgcgtgtgtgtgtg

SEQ ID NO: 7923 - DNA, 434 bp, Homo sapiens
cctggctcaacaaaagggctggggattggccctgaaaggagagagctgactgtcctggctgatggacaggagatcctcttagcactaccctaaggcaggcagttgggcattggtgtagacaacaggaaagtccaggctatagccgtactcaaaaacctttctgttccctttctgccagccctagggattgagtccacattcagcacaggactctctgggtacagctctctttaggaagacacaaattgcatggtgaagtcagttatatcctggccgcctttggtccctcccaggaagacgggcatgttttctgcttgagaggtgctgatgtaccagttggggaactgggcagactcaaattccagcttgttattgatttctatcttgttgaagacaaatcgcttttccatcttcttctttgggtaatttttggg

SEQ ID NO: 7924 - DNA, 116 bp, Homo sapiens
  unsure (20): n=A,T,C or G
  unsure (50): n=A,T,C or G
  unsure (61): n=A,T,C or G
  unsure (91): n=A,T,C or G
  unsure (98): n=A,T,C or G
  unsure (105): n=A,T,C or G
cctactatgggtgttaaatnttttactctctctacaaggttttttcctantgtccaaaganctgttcctctttggactaacagttaaattnacaaggngatttanagggttctgtg

SEQ ID NO: 7925 - DNA, 234 bp, Homo sapiens
cctacccattctcctagtttcttgttgtcatcaaccttaattaggttgatttggtgttcagcacaaagggcctccaccaacttgacatacataggctcatcacagttggatgcaagcacacaaagatgggcttggcgcttgtctaaggctttggcagcttcgcgaattccacgtgctaggccatcgtggatgagggcagtcttcagaacctcttgtaaagcagtattaacgtcc

SEQ ID NO: 7926 - DNA, 564 bp, Homo sapiens
  unsure (196): n=A,T,C or G
  unsure (417): n=A,T,C or G
  unsure (551): n=A,T,C or G
ctgcacatggattggttaacataatatatactgctatataatcttttaagggctaatatttgtagataatttaaaagcatgtcaatttcctctaagatttgattatttaacctgcacaaaggccaatcttcagttatcaatgacaagaaaactctagggctgccaaaataacttcattttagaccccagagttagngttaggctggtaatgtttctaatttgggaataatgagactagaaagctaggagggccccctccaaatttctcccttgtattaggctgaagtagaacataacgtggcttaaagcataaacttaaagcatatgctttgagttttaaaaatgttaacctgtaattaattattagagtattatccatagtctactatgatagtcagttaatattctctaaatcanattatattcatttgaaaatgcatctgcatatttgcaaatgtgttattacacaagatcttacctatgtcaatttaaagaggttaaagatgcaggaagcccccactaaaatgtaaacacatttgtacgggtttcanaatgtttggactc

SEQ ID NO: 7927 - DNA, 604 bp, Homo sapiens
ccatctctaattttattaagatctttgattatgttatccaggtgacaaaattctccaatcacgactcacctccagaagcttaaaacataattgtttcatatactgttaaacacttaagagatttgtaattttccagactttcaatgtctttacttgaatgtctgccttgcttagttactgtaaggttttgatttatttctccagtgtcattgtttttcagctttattgtttgatatagtaagatttcacatgcctagcttacgatgctgtttaaacttacaagctaactttgcctttttactttttaataggtccctgattaccctccaaactatattttattccttaataacttaccagaagagactaatgagatgatgttatccatgctgtttaatcagttccctggcttcaaggaagtacgtctggtaccagggaggcatgacattgcttttgttgaatttgaaaatgatgggcaggctggagctgccagggatgctttacagggatttaagatcacaccgtcccatgctatgaagatcacctatgccaagaaataacatttgggatagtcgtctttaaaagacttggtgttatttacagt

SEQ ID NO: 7928 - DNA, 541 bp, Homo sapiens
ccatatctcaagcaggtctgtccaatggcttggaacatagacttttgcagtgaaactttaaaaacattacttgaattaggattacacaaaaaaaactaaattctaagtgagcacaactatcgctgagaccctgaaatttcaggaaataaacatggttcaaaactcaaactgttcatcaaaataattacgcaggtcagccaccactgcagaaccatcactgctcagagaaattgagtcagcaatgactgatctcatcatctcttcattagcacataagcggttcaacttgggatacgcaaggagtctctgcagaggtacgaaaaatttatctccaacacagaagggtgtgggagagttctctatcttgaccttctcaatctctgtgaagactggtccaaagcatgggacaggggcctttgagccaccaatgtctttgggcttatcgccccgttccccagcctgttctttccgccttggcaggtggctcactcttaagctttccacttgttgggacacctcattaaccaacacaagtttaaag

SEQ ID NO: 7929 - DNA, 600 bp, Homo sapiens
gttggcagagaaatgggggtggatgttcacttccctaaagcagaggccagcatccaagctggtgctggagacggcgagtgggaagagtctgaagtcaaactgaaaaagtccaagatcaaaatgcccaagtttaatttttccaaacctaaagggaaaggtggtgtcactggctcaccagaagcatcaatttctgggtccaaaggtgacctgaaaagttcaaaggccagcctgggctctctggaaggagaggcagaggccgaagcctcttcaccgaaaggcaaattctccttatttaaaagtaagaagccacggcaccgctcaaattcattcagtgatgaaagagagttctctggaccttccaccccgacggggacgctggagtttgaaggtggggaagtgtctctggaaggtgggaaagttaaagggaaacacgggaagctgaaattcggtacctttggtggattggggtcaaagagcaaaggccattatgaggtgactgggagcgatgatgagacaggcaagttacaggggagtggggtgtccctggcctctaagaagtcccgactgtcctcctcttctagcaatgacagtgggaataag

SEQ ID NO: 7930 - DNA, 416 bp, Homo sapiens
  unsure (410): n=A,T,C or G
cctactatgggtgttaaattttttactctctctacaaggttttttcctagtgtccaaagagctgttcctctttggactaacagttaaatttacaaggggatttagagggttctgtgggcaaatttaaagttgaactaagattctatcttggacaaccagctatcaccaggctcggtaggtttgtcgcctctacctataaatcttcccactattttgctacatagacgggtgtgctcttttagctgttcttaggtagctcgtctggtttcgggggtcttagctttggctctccttgcaaagttatttctagttaattcattatgcagaaggtataggggttagtccttgctatattatgcttggttataatttttcatctttcccttgcggtactatatctattgcgccangtttca

SEQ ID NO: 7931 - DNA, 265 bp, Homo sapiens
ctgaagaaggaactgaatgaactggtcagtgctattgaagaacattttttccagccacagaagtacaatctgcagccaaaagcagactaaaatagtccagccttgggtatacttgcatttacctacaattaagctgggtttaacttgttaagcaatatttttaagggccaaatgattcaaaacatcacaggtatttatgtgttttacaaagacctacattcctcattgtttcatgtttgacctttaaggtgaaaaaagaaaatgg

SEQ ID NO: 7932 - DNA, 523 bp, Homo sapiens
ctgcagaggctaaacaaaaatgagatgataacatgtgacctttcttaggcagatggctggttggggaaagtagatgaatgaaaagaggaaaagatctccagaagagcgggaaggtataaagtttctctaggacagtttcccaaatcgtgcttcattggacattgacacaggagaaggctgtgggggaaaagaaaattcatgatcagataggtatggcaaatgcctcattctatggtttcctctttgagattctcaatgcaacattagactattaaaggctctgaaaaatcctacaagaaaacacctgtataaccttgtgtgaccaagtaataccaaaatttatttgccctctgagtctgctattttgccctcttcctccagcccttgacactgtttctcaggaagaaaacatccttcatgctggctactacctcatatgctctataacattgtggtgttcacagtttgaatttttcaaaatccagggtagaatttggcccccaaacctaaagctagtggacaa

SEQ ID NO: 7933 - DNA, 565 bp, Homo sapiens
  unsure (512): n=A,T,C or G
  unsure (542): n=A,T,C or G
  unsure (554): n=A,T,C or G
ctgtcattgctggtggagttattggctttctctttgcaatttttcttatcctgctgttggtgtatcgcatgagaaagaaggatgaaggaagctatgaccttggagaacgcaaaccatccagtgctgcttatcagaaggcacctactaaggagttttatgcgtaaaactccaacttagtgtctctatttatgagatcactgaacttttcaaaataaagcttttgcatagaataatgaagatctttgttttttgttttcattaaagagccattctggcactttaatgataaaatcccattgtatttaaaacatttcatgtatttctttagaacaacataaaattaaaatttaacatctgcagtgttctgtgaatagcagtggcaaaatattatgttatgaaaaccctcgatgttcatggaattggtttaaacctttatgcgcaaatacaaaatgattgtctttttcctatgactcaaagatgaaagctgtttcatttgtgtcagcatgtctcanattgaccttaccaagttggtcttactttgntaatttatctgntgtccccttcc

SEQ ID NO: 7934 - DNA, 542 bp, Homo sapiens
ccagaaccctggtggcaggagcatctgatatccctgtctttttccaaaaacctaactgtgtacaaatatgcacacaaacttatcttatatgtgtccatttctcttaatgatatttaccagcttaagaaattaacaaacattttatgtgattctcagatttttcaagtcaaggacaaattcagttttcacattatttttcaagtgtatcttatcttcggaggcattaacagggcagtaacattattaccatcactgtatctgtcattctgttttgggggattaccattgttgccaataaaacttacatttcattcccatccttagcaaattaatttagttacatgcagggtccaaacaataattatgagtttagagagagcttcagaaagccagcgatcatctgtaaggtgtgggctgaaaccaacattggaggaaggtacggccttgattattcagcaactgaaatgacttcctttaattagctcttgaggacccaaagtgggccatctgggttaatttcagtcagctcaaatcaagcactc

SEQ ID NO: 7935 - DNA, 564 bp, Homo sapiens; identical to SEQ ID NO: 609

SEQ ID NO: 7936 - DNA, 527 bp, Homo sapiens
  unsure (80): n=A,T,C or G
  unsure (101): n=A,T,C or G
  unsure (141): n=A,T,C or G
  unsure (185): n=A,T,C or G
  unsure (187): n=A,T,C or G
  unsure (202): n=A,T,C or G
  unsure (209): n=A,T,C or G
  unsure (228): n=A,T,C or G
  unsure (245): n=A,T,C or G
  unsure (273): n=A,T,C or G
  unsure (296): n=A,T,C or G
  unsure (319): n=A,T,C or G
  unsure (347): n=A,T,C or G
  unsure (366): n=A,T,C or G
  unsure (404): n=A,T,C or G
  unsure (409): n=A,T,C or G
  unsure (448): n=A,T,C or G
  unsure (472): n=A,T,C or G
  unsure (482): n=A,T,C or G
  unsure (521): n=A,T,C or G
ctgagtatagttcaacagttttgctgacagatgggaacaatcttttttttttttttccaactgccatctatacaattttnttacagatgtcaaaagcagtntagtttatataagcattctgttacctgtgatattttttanactgaactgctccattcctagtcttaattaccatattcagggtncnaactggagggcttgngtgttancttctgaattggcaattgnaggcggtagtggtcgtncctgtgtgtatcaaaagggataggtatnttgcctcctttctctcaggcagngcaaatcaccctgtggaaaaccnatggacaggaaggagtgttacacactgnttaccctgatttattcagnggttttgttttcattctggaaccatactatcaaatggngacanactgttccgttccacccccgtgaagtaatcatgcaccgngtgaatagtatcaagcaggattgntttcattgtntggagcatgaccagcgtgtgactcattctgacatttcanatccta

SEQ ID NO: 7937 - DNA, 474 bp, Homo sapiens
ccttatttctcttgtcctttcgtacagggaggaatttgaagtagatagaaaccgacctggattactccggtctgaactcagatcacgtaggactttaatcgttgaacaaacgaacctttaatagcggctgcaccattgggatgtcctgatccaacatcgaggtcgtaaaccctattgttgatatggactctagaataggattgcgctgttatccctagggtaacttgttccgttggtcaagttattggatcaattgagtatagtagttcgctttgactggtgaagtcttagcatgtactgctcggaggttgggttctgctccgaggtcgccccaaccgaaatttttaatgcaggtttggtagtttaggacctgtgggtttgttaggtactgtttgcattaataaattaaagctccatagggtcttctcgtcttgctgtgttatgcccgcctcttcacgggcaggtcaatttcac

SEQ ID NO: 7938 - DNA, 355 bp, Homo sapiens
ctggatcacgaggtcaagagttcaagaccagtttggtcaagatggtgagacccccgtctctactaaaaatacaaaaattagccaggcatgacagcggatgcctgtaatcccagctattcgggaggctgaggcagagaatcgcttgaacttgggagggggaggttgcagtgagctgagatcaagccgctacactccaccttgggcaacagggtgagactctgactccatctcaaaaaaaaaaaaaaaaaaaatccaagagtagggctgagcatggtggctcacgcctgtaatcccagcactttgggaggacgaggagggtggatcacctgaagtcaggagtttaagaccagcctgg

SEQ ID NO: 7939 - DNA, 423 bp, Homo sapiens
  unsure (263): n=A,T,C or G
  unsure (298): n=A,T,C or G
  unsure (306): n=A,T,C or G
  unsure (345): n=A,T,C or G
  unsure (350): n=A,T,C or G
  unsure (371): n=A,T,C or G
gtcggcatcatactaaaagcaatgtttaaatcaaactaaagattaaaaattaaaattcgtttttgcaataatgacaaatgccctgcacctacccacatgcactcgtgtgagacaaggcccataggtatggccccccccttccccctcccagtactagttaattttgagtaattgtattgtcagaaaagtgattagtactatttttttttgttgtttcaaaaaaaaaatttttgtgtgtgtgtgtttttttttttttttttttngggggttaaaagcaaggcatgcttgtggatgactntgtaacanactaattggaattgttgaagctgctccctggttccactntgganagtaatctgggacatcttagngttttgttttgtttttttccctcctcttttttttgggggggagtgtgtgtgg

SEQ ID NO: 7940 - DNA, 138 bp, Homo sapiens
  unsure (105): n=A,T,C or G
aaagctgtctgagaccctcctcccctcctccccagcatggagagaataattgccatttcaccctacaaatccgaaagagtctcccccttccgtgggtttaagcanggacacaagccaagcaagcctcagatacccagg

SEQ ID NO: 7941 - DNA, 550 bp, Homo sapiens; identical to SEQ ID NO: 610

SEQ ID NO: 7942 - DNA, 559 bp, Homo sapiens
  unsure (91): n=A,T,C or G
  unsure (294): n=A,T,C or G
  unsure (493): n=A,T,C or G
  unsure (549): n=A,T,C or G
  unsure (555): n=A,T,C or G
ctgaactctctgaacttgtcttctccttttgatttgaattttccattgccaggagagaagggccctgcatgccttgtgaaggtttatgaanattgggattgtttcaaagtaaatgacattcttgagctatatggcatactgtctgtggatcctgtgctgagtatactgaataatgatgaaagggatgcctctgcactgctggatccgatggagtgcacagacacagcagaggagcagagagtacacagtcctcctgcttcattagtgccgagaattcatgtgatcttagcccanaagttgcaacacatcaacccattattgcctgcctgccttaacaaagaggagagcaaaacctgtaagtatatacaagaagagatgtccttccactaggaaaatttacagttaacttgagtggttgcccacggaatagtaccttcacagaacacttgtatcgaattattcaacatcttgttccagcatcttttcgtctgcngatgactatagagaacatgaaccatttgaaattcattccccacaaagactacacanccaatngctt

SEQ ID NO: 7943 - DNA, 260 bp, Homo sapiens
cctgaagtgaggaaaacctatttaggactgacatctaactagagaaagtcagggaatgaggcaggagaagaggcaaagtcctcatgaaccacaaagatagagtggaaaatcctaagtaggaaaaaatacatggaaaagggcaaatgagcaacagcagtgaatgagttgagattgaaaaggaaagagttcaaggaaggagaggcaatggggcaagacaaaataaatctgaggaaacagagcaaataaaaagtatggaggga

SEQ ID NO: 7944 - DNA, 600 bp, Homo sapiens
ccagtggaatgatgttccctgcaattaccatctcacctatacgtgcaagaaaggaacagttgcttgcggccagccccctgttgtagaaaatgccaagacctttggaaagatgaaacctcgttatgaaatcaactccctgattagataccactgcaaagatggtttcattcaacgtcaccttccaactatccggtgcttaggaaatggaagatgggctatacctaaaattacctgcatgaaccgtaagtggtcctttagaaagaatggactaccgtgctataacaactactagacaccttcattttacggctgtggtatcggcagtttagggtatggagcaagtaatattgtgtgttttctttttttctttctttccttccatgtagcatctgcataccaaaggacttattctatgaaatactttaaaaattcctcatcagcaaaggacaattcaataaatacatccaaacatgatcatcgttggagccggaggtggcaggagtcgaggcgctgatccctaaaatggcgaacatgtgttttcatcatttcagccaaagtcctaacttcctgtgcctttcctatcacctcgagaagtaatta

SEQ ID NO: 7945 - DNA, 150 bp, Homo sapiens
ctgcccaatgcaggcagaaggcaggaaggctatagtgttacagccctggcttgggaaatcctgatgtctcggcccccagaagtgtcactgcttttcactcctgcagtccagcaaatgggagcatgtcaccaccacagtttggtgagttgg

SEQ ID NO: 7946 - DNA, 519 bp, Homo sapiens
ccaacccaaagaacatctttcccatagcatctttgtcccttgccccacaaaaattcttctttctctttcgctgcagagtgtagatcccaaaaattacccaaagaagaagatggaaaagcgatttgtcttcaacaagatagaaatcaataacaagctggaatttgagtctgcccagttccccaactggtacatcagcacctctcaagcagaaaacatgcccgtcttcctgggaaggaccaaaggcggccaggatataactgacttcaccatgcaatttgtgtcttcctaaagagagctgtacccagagagtcctgtgctgaatgtggactcaatccctagggctggcagaaagggaacagaaaggtttttgagtacggctatagcctggactttcctgttgtctacaccaatgcccaactgcctgccttagggtagtgctaagaggatctcctgtccatcagccaggacagtcagctctctcctttcagggccaatccccagcccttttgttgagccagg

SEQ ID NO: 7947 - DNA, 383 bp, Homo sapiens
ccatggacaagctgaggaagatgctggttccctgcccacagaccttccaggagaatgacctgagcaccttctttcccttcatctttgaagaagaacctatcttctttgacacatgggataacgaggcttatgtgcacgatgcacctgtacgatcactgaactgcacgctccgggactcacagcaaaaaagcttggtgatgtctggtccatatgaactgaaagctctccacctccagggacaggatatggagcaacaagtggtgttctccatgtcctttgtacaaggagaagaaagtaatgacaaaatacctgtggccttgggcctcaaggaaaagaatctgtacctgtcctgcgtgttgaaagatgataagcccactctacag

SEQ ID NO: 7948 - DNA, 578 bp, Homo sapiens
cctcaatgacaagatgtttgagcatgacttccgttggactgatggcagcacactggtaagatgcccttgaaaatgatgtcaagttctaccttctggaaatttggtactgtgcactgattgtgcattacagagggtgcattagactggaggcaagttaaatgacttgctcaaggtcactcagtgaaacagagaagggttagaagagttccaagctacctgatccaacatccagtcctctcttcaatagttgtggttctcttcaaaagaggagtgtaccagatttctatcaaaccagaaaaccagacaattagtagaattgccttgggtctgtctttcagatggttatctttgctttttctagcttcagagcaaaaagagaagaataaaatgtagcagaaaaagtcattttaaaaaaatacctttccgtcttaaataattcactggaaatccgctataaggcatgactcatttccaagcaaaaatatccatttatttttatcttaaagaagactgttgatatgatcttgtgaatttctgccaactaattacatatttcaacttgttttctattttttgaa

SEQ ID NO: 7949 - DNA, 611 bp, Homo sapiens
  unsure (561): n=A,T,C or G
ctgcatcccatgtgcgtcgatgggcaaagtatttgtagcactgcccttggaatttgtgccagccatagtcacatgtctcggtatcttgctcacaaagtgcaccaacataacttggaaggcagaggcacctgaatgtgttaaaaccatcaacacaagtggctccattacgacagggattagagtgacattcatcaaaatcaagttcacactggtctccgctgtatcctggcacacaggtgcatacgtaggaagtttcagtaggataacaggtgcctccgttaaggcacgggttcattttgcagcgatcaggtcctggtaaatagattgccgtgccttccactgactcttcattaatgccaatcaggaaatctgtttcattagaagtctccagaagggaaaatggtggtgttgcaacctcagtattaaattccacagggtttactgttgcctgatcattggaatcaagaattctcgctgccacttgctgttctgatgctgctatcgtggaatcctgccctctgattaaagctgcttgagtttcagggtttatttctggagaanaagaaagcgtgggcctctcagaagtctgtggacttagccaaggcaccaca

SEQ ID NO: 7950 - DNA, 553 bp, Homo sapiens
  unsure (368): n=A,T,C or G
  unsure (493): n=A,T,C or G
  unsure (546): n=A,T,C or G
ccttctgctagtcctggtaagaaaaatcctatttcagaccattaaagctaagttattttgacataatcatgattcttttcaataaacattaaacatgacattgtggaatatcaaatctaaccaaaaatgcctgtacttaacaaaacgaagatttttgtccgaattatctctggctacactcaacacttccagcaggcagttgctcaactttccaatgtctgcataaaatacagttctgaagccaatttttttagattaaaataaaaagccactctttagcataaaccttcattcaacgaaattgggtaaataagatttaattaagaaaattaggagccgcgttcattgcaaaccgtagtttactttancatttcacttgtaattaagttaggggcttagggatgcattgaaaacaccaaaggataagtatctcaaagttctaaaaatgtctcaatactaaaatgatgttctggggtgattttgcaaggaccanaagacatcatacattgcgaacccagtgagggtggcatcgcggacgaacagaanatgcttt

SEQ ID NO: 7951 - DNA, 499 bp, Homo sapiens
ctgtttaaccagaaccaaggtgttcaccccccacagaatgtacatgaaacactagaggactgcatgtttttccctgagagaagcgtaagacaaacagaagtcaaaaagtagtcactgggagcgccatccttctaagcaaatcctccctttcccttttggaggatttgcccgaactacgtagccagtcagcacttagaccacctgcctcctcctccccctataaacccaccactcccctcctcctttcccaaaccacttggggtgtcctaagccctcactgccccaagcccaaaatatcaactaagatccttgtctgtatttccacagtcatacctaatgaattgggaagtggggcccctaaaaaccaattcacatctatgcacttgtttccactggatttggcagacaggcttttttagttaccgtaaccagatcttaagattaattaaaaactacataaagtgcttttaggtccttagagatacatgatataaataag

SEQ ID NO: 7952 - DNA, 503 bp, Homo sapiens
  unsure (6): n=A,T,C or G
  unsure (195): n=A,T,C or G
  unsure (314): n=A,T,C or G
  unsure (343): n=A,T,C or G
ttgcanagctgtgggctgagcactcaggcaatcacactctcagaaactgcggcggctctggactgcagcctcccaaggctccatgccagacaaagcatgcgtgtcacacttgctacaatagcctggatggtttcttttgtctccaattattcacacacagcaaatattttgccagatatcgaaaatgaagatttnatcaaagactgcgttcgaatccataacaagttccgatcagaggtgaaaccaacagccagtgatatgctatacatgacttgggacccagcactagcccaaattgcaaaagcatgggccancaattgccagttttcacataatacacggntgaagccaccccacaagctgcacccaaacttcacttcactgggagagaacatctggactgggtctgtgcccattttttctgtgtcttccgccatcacaaactggtatgacgaaatccaggactatgacttcaagactcggatatgcaaaaaagtctgtgg

SEQ ID NO: 7953 - DNA, 597 bp, Homo sapiens
tgcagattttggccttgctagagtaattgaagataatgagtacacagcaagggaaggtgctaagttccctattaagtggacggctccagaagcaatcaactttggatgtttcactattaagtctgatgtgtggtcctttggaatcctcctatacgaaattgtcacctatgggaaaattccctacccagggagaactaatgccgacgtgatgaccgccctgtcccagggctacaggatgccccgtgtggagaactgcccagatgagctctatgacattatgaaaatgtgctggaaagaaaaggcagaagagagaccaacgtttgactacttacagagcgtcctggatgatttctacacagccacggaagggcaataccagcagcagccttagagcacagggagacccgtccatttggcaggggtggctgcctcatttagagaggaaaagtaaccatcactggttgcacttatgatttcatgtgcggggatcatctgccgtgcctggatcctgaaatagaggctaaattactcaggaagaacaccctctaaatgggaaagtattctgtactcttagatggattctccactcagttgcaa

SEQ ID NO: 7954 - DNA, 519 bp, Homo sapiens
cctggctcaacaaaagggctggggattggccctgaaaggagagagctgactgtcctggctgatggacaggagatcctcttagcactaccctaaggcaggcagttgggcattggtgtagacaacaggaaagtccaggctatagccgtactcaaaaacctttctgttccctttctgccagccctagggattgagtccacattcagcacaggactctctgggtacagctctctttaggaagacacaaattgcatggtgaagtcagttatatcctggccgcctttggtccctcccaggaagacgggcatgttttctgcttgagaggtgctgatgtaccagttggggaactgggcagactcaaattccagcttgttattgatttctatcttgttgaagacaaatcgcttttccatcttcttctttgggtaatttttgggatctacactctgcagcgaaagagaaagaagaatttttgtggggcaagggacaaagatgctatgggaaagatgttctttgggttgg

SEQ ID NO: 7955 - DNA, 599 bp, Homo sapiens
ctggacaagaaagagcaaatgccaaaatagaacaagaatggttttgttgaggtgtttacagaataagcaaagcctgggttttaattggaatttaattcagagttctgtctgagtccatcaaatgatccctgttgaagattaaaagtttactgccttaggcagtaagtcttaaattatttttgatagtatttatttaaaaattttaaaaactatgtacctctcacattttaagttgccaacaaaattttttttcatcataaagttatacaactatagaggatgtaatttttgacctattttaaatattgtcattctaaaataagcatgtaatatcactttcaggatatattcagtggaatctaaatatcatagtggtttgacctcttacatcattcttttaaaagtagtcttttattaagagtcaaaaattttatatttttgttttcgttggactaattctaaaatttaagttcctcttacggaatgttatcaaaaattatatagttatatgcttagaagtcttctattgattaagccatcaaacttaagtacatcaaaatttgtactttaaagtttaaattcttttttccttgtgaaca

SEQ ID NO: 7956 - DNA, 392 bp, Homo sapiens; identical to SEQ ID NO: 7567

SEQ ID NO: 7957 - DNA, 350 bp, Homo sapiens
  unsure (20): n=A,T,C or G
  unsure (90): n=A,T,C or G
  unsure (130): n=A,T,C or G
  unsure (146): n=A,T,C or G
  unsure (152): n=A,T,C or G
  unsure (164): n=A,T,C or G
  unsure (185): n=A,T,C or G
  unsure (209): n=A,T,C or G
  unsure (247): n=A,T,C or G
  unsure (258): n=A,T,C or G
  unsure (266): n=A,T,C or G
  unsure (305): n=A,T,C or G
  unsure (326): n=A,T,C or G
  unsure (329): n=A,T,C or G
ttattttcactccaaaggcncatctactgttcctactattattgctacagatattccaaaaagtgagtaggtggaaagaagggattaaanaataccaccacaggaaaaaaatatttaacttatgacctanataattttagtcattnaatatnttaaaatatatnttatgacttaaaagagaaagnattctatttaccatatatacaaanaaaataccgtatttggaatccaatagacttggttccanaatacataaanaactgctncaactgatgataaataaataacctgaccttaaaaatggnacaaaacttttaaagagatgntcntaaaagaagatatacaaatgg

SEQ ID NO: 7958 - DNA, 487 bp, Homo sapiens
  unsure (19): n=A,T,C or G
cctttcttacaaccagcangactcccctcctttccatgagtacctaccccagtgttcctcctgagatggcctatggttggatggttgagcacaaacacaggcaccgtcacaaacacagagaacaccgttcttctgaacaaccccaggtttctatggacactggctcttcccgatctgtcctggaatctttgaagcgctatagatttggaaaggatgctgttggagagcgatataagcataaggaaaagcaccgttgtcacatgtcctgccctcatctctctccttcaaaaagcttaataaacagagaggaacagtgggtccaccgagagccttcagaatctagtccattggccttgggattgcagacacctttacagattgactgttcagaaagttctccaagcttatcccttggaggattcactcccaactctgagccagccagcagtgatgaacatacaaaccttttcacaagtgcaataggcag

SEQ ID NO: 7959 - DNA, 608 bp, Homo sapiens
  unsure (538): n=A,T,C or G
ccatgggaatctaattaatttcataatgatgttggttgaacatgataccaaaaaatgcaggtattttcaagaacaataagatagataacagcattaaagcataatcctttaagaattcatgagaaaaaaaaggatgataaaacttaagcttctttttcagatgtttaaaaatttctataaaattctttgtcccaagattaatcatataaccatggtacataaaatatgctaactacattgcctggtgtcaaggtgggaaaatcctcttttataacataaaatcctcttctaatccatgttgacccaagtcctggctgtctgagggcagattcctgtcaagagacctaaggttgtcatggaaagcatcactttcgtctactagttggtaatcctgttccatttccgttaggaagccactcccagatcctgatccagagccggagccggagccgaagcctgatccagagtagtcctcagaaagtgggaagatacgattcaagtcctggattcccgtctttggaaaaaggtcagtcctcanacgggggatcttgttggattcacctggaagtagttcgaacattggtcctttttcttcaaggcagtttgca

SEQ ID NO: 7960 - DNA, 606 bp, Homo sapiens
ccttatttgtagatttcattttggtttattatggtttctaattattcaaagtaataacaaagcatatacaaagagatgccacatgtcctgtactttttgcttggttttgaatacttaggaattcctcaaattactttttcatgaaaacatgactgatattactaatgggaaaaaaatctctgaaattaacaaaagaaaacacgcctacacatatatgcactaactaaagatatattctgagacctattctattactgtggtatgagggagagagaatttaattttccctttaaagaaggactggggatggcacagggagcgacaggaccagtcctgccagtgagcagcaatgtgtctgtgggtggctgtgcaagacggaaggcgaggctctcaagtaaggcacctggaaagacactcagtgtgaactactggcccaggaatcactcatggcaaaacgtaccaaggtcaccaggagaaaacagggttagaagcagcttctcataagaggctgcctgataagcaatgaaagtgatgatttgttttgggatctataggtttcagtactttgaaataacagatagtaaagccttcttcttttacacacct

SEQ ID NO: 7961 - DNA, 470 bp, Homo sapiens
  unsure (20): n=A,T,C or G
  unsure (113): n=A,T,C or G
  unsure (121): n=A,T,C or G
  unsure (171): n=A,T,C or G
  unsure (210): n=A,T,C or G
  unsure (216): n=A,T,C or G
  unsure (445): n=A,T,C or G
ttttttttttttttttttanaaatctatttatttatcaaaacagtattggcacagtaattctcatattatcatcaaataataaaattgctactttctgtactcaattctttanaatcctanaaattgcaaatgcattcaatttaacaatattgtaaataacaatacaaaanaaagaactctgcatatttatggaaacattgttgatggtncagttntactgaaactcatacacatttcactatttaatttacatatggtcttgttgaaaaaaaccagtatgttttactttttcaatttccttatgctaaaatacatgtaattctaaaggatatctcttaggtgttataaaaaccaaggaaggtccaccaccaagtcaaagttagagtcaaagatacttcaaagattccatgaaatgatctgaaaacaaatttaaccaaaaaatgngtactgtattggggcacatccatgg

SEQ ID NO: 7962 - DNA, 543 bp, Homo sapiens
cctttcttaaacaacttactctgcattaaaaagtcatcaataagaactgtaattcagtgtttttaaaaatgaaatgtttaacttcaaattgtttgtttaaaataaactgctattgtgccaaataatgaaactactattttattcattacaaacatcatataatcattctctataatcactataaaaatttaaatgcttcctttctcctgtatatgaagatggtagttctaaagcaacactctaaaagtgttaaaaagcccattcgtaacacacaccccacctcagtttttgaaagtcagtgcattcagtggttataaataggcatgatgttcttccacagctaagagttctgagtgtcaatcagttgtgtttttttctcccaagggaagacgttcccataactggagcaactgttcaccaacctgaggttctagttcctagataaatcagaagtcaaaataaacataaaaagaactggagtgaaaatttttaatgaccaaaacctacactgataaaaatgtaagaaaatcactttaaatttca

SEQ ID NO: 7963 - DNA, 560 bp, Homo sapiens
  unsure (446): n=A,T,C or G
  unsure (491): n=A,T,C or G
  unsure (536): n=A,T,C or G
  unsure (554): n=A,T,C or G
ctgaaaaccatgctgttcaagggtcaactgtgtgtggtatcggtgagactgaatgattatcgttggtgttcttaaattattttcaggtcctctagaaaataagataattatagcaaaaaataaaattgttttgaaattttgataaatatataaatgtatagaacctatttttttcaatgaaagaaaatgggaaacattttttaacattgctagattggcagtgctttcttttattatttcaagttatggaaatttgcacagttgaaaactggggataaattctacaaaagtgcaagaaaacaattcaaattagccagagccctgctaaaacttttaatgtaaaatttatttatttgcactgagctgttttaccttctttaaggccattgggacctctcaatgatgcatatgtttcatacatcttgtattttccaggtagaagtcanacttggttaataccaataaatacttctgtaatcctattggctcanttacctttataatgaagtatattctgtgtaaggtaattcttccantgatggtctgagtagtanagtctt

SEQ ID NO: 7964 - DNA, 598 bp, Homo sapiens
  unsure (593): n=A,T,C or G
ccttgtgggtaatggtgaaaattctggattttattctgagagcaacaggattccgctgaagaatttttaaccagagaggtaatgtgatctaatttgtttgaaaaagaacaggtctgttgctgaatgaaatagattagagggaaaagtgcagatatcaagtaggcaaataaatgtttggagctcagacctagagaggaagaggatcagggatcagcagttctgaaaagatctctaacttaccagcagactgtgatcgccttgtgggaagagacttgcgtttctgaattccctgttgtgtgtttgttttgagagaaaacagagcatatttgtatgctggcagaagtgacagaagtgatagaaaattctagaaagtaaagatgcaggaattaagagtgagataattaaagggtcaacttccttgagaaggtgtgcacatgtagagagattcattttgaaaggagagaggatacttcctctacaataaagagaggaaagggcaagctggaacagactctggcaggcgtgtggcatctgtggttggggtaggaaatgctcatttgctaatctgtactttctcagtgaagtcgagcggnaagga

SEQ ID NO: 7965 - DNA, 597 bp, Homo sapiens
gtcgaggcaggtgtggtgccttggctaagtccacagacttctgagaggcccacgctttcttcttctccagaaataaaccctgaaactcaagcagctttaatcagagggcaggattccacgatagcagcatcagaacagcaagtggcagcgagaattcttgattccaatgatcaggcaacagtaaaccctgtggaatttaatactgaggttgcaacaccaccattttcccttctggagacttctaatgaaacagatttcctgattggcattaatgaagagtcagtggaaggcacggcaatctatttaccaggacctgatcgctgcaaaatgaacccgtgccttaacggaggcacctgttatcctactgaaacttcctacgtatgcacctgtgtgccaggatacagcggagaccagtgtgaacttgattttgatgaatgtcactctaatccctgtcgtaatggagccacttgtgttgatggttttaacacattcaggtgcctctgccttccaagttatgttggtgcactttgtgagcaagataccgagacatgtgactatggctggcacaaattccaagggcagtgctacaaatacttt

SEQ ID NO: 7966 - DNA, 538 bp, Homo sapiens
ctgcaagcagccgaggcagatggagcccaagccctgttgcttgtggtcttggcttactgagcctgaatccacgaccggatcattagaaaagggacggtgtgtgtgcctacctttgaagccagtaggccaaaagaagggtgagcaggacagcgccataacacctagagttactgtgtttggttcacacttctggtttcctgcagaattgctagaatttttaaaaaaaggaagcagcaagttgagagcaactaaagtaaaaagagaaaagtgatacaaagggaaaggtttatttttggagctcttagattctgaaactccttctgactcttttatccttttacctctccctttctcctcactgggctctttgtcctcatggggactgtgcatctctggtctcactctagctctgggtcccttaggctcttctggttttctggctcctggagtgagccctttcaatgaggccctccctcaatttcccatccctcttgttcttctgccatccagactcatcacagcccaaatctgagaccag

SEQ ID NO: 7967 - DNA, 158 bp, Homo sapiens
cacgagtctgactggcctttgggtggcctttgtggacggctcgtagctggaaagtgttgatctgggttttctggcattcttttaagttaaaaagttgacatcgggacaggggtttgatcttttgttgtacctgatgacagtgcagagattctccacag

SEQ ID NO: 7968 - DNA, 474 bp, Homo sapiens
ttttgctcttggtttgcattccagtctcttctcgaagacaaaggtctggcagaggtgtctaaggttgcagagcaagtactgaatgccgtaaataaggggctctacagagaggccacagagctgtgggggaaagcagaaatgatcattgaacagaacacagatggggtgaacttctataacatcttaactaaaagcactcccacgtctacaatggagtcgagtctagaattcacacagagccacctagtttgtctttgtcagcgccacgtgagacacctacaacgagatgccttaagccagctcatgaatggccccatcagaaagaagctcaaaattattcctgaggatcaatcctggggaggccaggctaccaacgtctttgtgaacatggaggaggacttcatgaagccagtcattagcattgtggacgagttgctggaggcagggatcaacgtgacggtgtataatggacag

SEQ ID NO: 7969 - DNA, 417 bp, Homo sapiens
ctgcagtctcccagcctccactttcagagtgaaattcaaggcagcacggacatgtgcccatcaggcacagaagaaaacacgacgtcgtccattttggaagagacgaaagaaaggaaaataaactctttgtatgatatttattaggaggaaagaggactgaaaatgttcttgtgtagaaacagaaggacagcatttctgttagtcatttcctggaaaagtaatattttaaggggaaattatggaaacaatctaattgttcaattgctgtgctagtggtagggtttattttctgggaggtctctcctttgtgtgtctgtatgtttgtgtacacacacgtgcccatctgctgtcccagaggggaggggttgtgtgtgcgagtgtatggagttagtgtggaacttaagagctggaagacag

SEQ ID NO: 7970 - DNA, 449 bp, Homo sapiens
  unsure (13): n=A,T,C or G
ctggagagtgtanatcccaaaaattacccaaagaagaagatggaaaagcgatttgtcttcaacaagatagaaatcaataacaagctggaatttgagtctgcccagttccccaactggtacatcagcacctctcaagcagaaaacatgcccgtcttcctgggagggaccaaaggcggccaggatataactgacttcaccatgcaatttgtgtcttcctaaagagagctgtacccagagagtcctgtgctgaatgtggactcaatccctagggctggcagaaagggaacagaaaggtttttgagtacggctatagcctggactttcctgttgtctacaccaatgcccaactgcctgccttagggtagtgctaagaggatctcctgtccatcagccaggacagtcagctctctcctttcagggccaatccccagcccttttgttgagccagg

SEQ ID NO: 7971 - DNA, 383 bp, Homo sapiens; identical to SEQ ID NO: 7947

SEQ ID NO: 7972 - DNA, 572 bp, Homo sapiens
  unsure (564): n=A,T,C or G
gaaaaagctgatgctaataaccagacaacagaacctcagcttaagaaaggcagccaagtggaggcactcttcagttatgaggctacccaaccagaggacctggagtttcaggaaggggatataatcctggtgttatcaaaggtgaatgaagaatggctggaaggggagtgcaaagggaaggtgggcattttccccaaagtttttgttgaagactgcgcaactacagatttggaaagcactcggagagaagtctaggatgtttcacaaactacaaagctgaagaaaatgaagccctattacttgtttgtaagatttagcacccttctgctgtatactgtactgagacattacagtttggaagtgttaactatttattccctgttaaaatttaacctactagacaatgatgtgagtacccaggatgatttcctggggcacagtgggtgaggagatggggacaggtgaatggaggagttaggggagaggaaaagtggatggaagtgtctggaaagggcacgagagagtcttccaggtactgatcctgtttcttgctctgagtgctanctagccag

SEQ ID NO: 7973 - DNA, 375 bp, Homo sapiens
ccaccatgtgttctcattgctgtaataaaccaaaggacttactccaacacctgaagcttgcagtcggggtgcaagagtccctcacagagtagtttgatccccttgtctccgagagtgttgcctcgcaggtaaaggtgcgtgagattctgattagtgctgagtaccgaggacaaagctgaacaacagactgacgtaaggccagaattcaccaaccccagtttctgcaggttacactgtggattcttggctttttcacataaaattgcgactcctgagtctcccaaggcattctcccccacatagagtctggtcagggaatggctggtgctcaatactgatgcaagatcctgacaacatgctgatgtgaggcagcag

SEQ ID NO: 7974 - DNA, 599 bp, Homo sapiens
  unsure (590): n=A,T,C or G
ctgcctatgttaatgccattgagaaagtcttcaaagtgtacaatgaagctggtgtgaccttcacatagatggatcatggctgacttcctcactatcctcttcacatgtaacttctgcagacctatcacaagtttacatgtaaccacagaaatccctttctctcctgactcattaataatggataccattctcaacaagtcaatccaagtcagcccgttaaggagaaagaaattaaggttagcggatcatgtacaagctgagtgtgaaagtagaaatcacctacaccagagagccattttggtattttgcctttaaataaaaagcctcctttatctggctgtgcagccttgctctgtggcttttcccaacacaatcagtgctagtgctggggaggaacagtcaagagcagtcagttgcttgcttattttttctggatgagtctgggacacactgtaactttaacacatttaagaagtaggtgtgtggccttttcagaaggtggcatggtcctcaagtgagttcttagtattttatatcagcaaaataattcaattttgcaggttacaaacaaatataaaacctgtttctgnttatgaata

SEQ ID NO: 7975 - DNA, 265 bp, Homo sapiens
ctgaacagagaaaggaattaaaacgctttaattaaaaaatcacgagtggatgataaagtgtgtagaaactgaaaatttacaaactatttaaaacctggaatcgctgactgttcagaaactacacagatggatcatgggtggtggtgaacagcagaaagggattatggatgaatctgcattgttctagctgctccccatgccacccgtctccgaggaaagcctgtaacacagaaacaagaactcagttagtttccccagtgctcag

SEQ ID NO: 7976 - DNA, 597 bp, Homo sapiens
ctgggaagccacgagaatattgtgaacctgctgggggcgtgcacactgtcaggaccaatttacttgatttttgaatactgttgctatggtgatcttctcaactatctaagaagtaaaagagaaaaatttcacaggacttggacagagattttcaaggaacacaatttcagtttttaccccactttccaatcacatccaaattccagcatgcctggttcaagagaagttcagatacacccggactcggatcaaatctcagggcttcatgggaattcatttcactctgaagatgaaattgaatatgaaaaccaaaaaaggctggaagaagaggaggacttgaatgtgcttacatttgaagatcttctttgctttgcatatcaagttgccaaaggaatggaatttctggaatttaagtcgtgtgttcacagagacctggccgccaggaacgtgcttgtcacccacgggaaagtggtgaagatatgtgactttggattggctcgagatatcatgagtgattccaactatgttgtcaggggcaatgcccgtctgcctgtaaaatggatggcccccgaaagcctgtttgaaggcatctacacc

SEQ ID NO: 7977 - DNA, 596 bp, Homo sapiens
agtctaggcagaatgtaactctaaaccattgtagactgtcctgaagattcataatttctttccccaaaagaattattcttaatatgcacatttaacactgaaatgtagctgtaattcaaggtaagcttaggaacttcaccctctaagcacagacttctatgcagcacatacttctataatcagtaaacttaattcacaaaattagcgcataagggtattaagtgcatgggaagtaaacacagttatgttacacttaaaattacttttgaatgattgataaaggatttcttcatgattgattatcttaagaaaatggaagtctgtgtaacttgaatttggcagggcatgaaataagtggtaaaaacagcaaactgataacttgagaatcattttcgttttactgagaatactttatttgctggtagaagttgctaaaaatgcacagaacaaataccaatagaaaatgcactgtatttgaatctccctagtctatataaaatgaacggtgtacagcatctgttggaaaaatggctgcatggacatttcttattttatgcccacttataaataaaaataaaccttttattcaagagtat

SEQ ID NO: 7978 - DNA, 599 bp, Homo sapiens
  unsure (13): n=A,T,C or G
ccaccgtcacagnccaggatgaagaggagtacagggtcctgtgagctgtttgaccactgttctaagactatgtgtgcccaaaagcacataagcatctatgttgagagtaagtttgtatcctgcgttggtctcagaaagaacgtgaatgcttaagattttgaaagtacataatattttatactttgggagagagctttaagagtccctggaaatactttttaatttttttaacttaaaattcaagagactgaatcacttttctcattgattaaatgtaaagattattgagaaacctatagtaaatgaaatttgtaagatgttttctcaaatatatgctgtgcctgtacttatatacagtctttcaagagagatacaaacaaggcagaaacatttaaactagtattaaaggtagtttaccaaagcattttttgttttcttaccttgaaaacacagaaccgttaattccttggtttaagcagttgctaagttttttaattttaggctcagaggcccataggaggttttaagatttatgtttagtccgataggtgaggtctttgatattttgaattttaactccttttatgatacatcacagt

SEQ ID NO: 7979 - DNA, 575 bp, Homo sapiens
  unsure (19): n=A,T,C or G
  unsure (152): n=A,T,C or G
ctgggagagctagactaanttggtcatgatgcagaagctactcaaatgcagtcggcttgtcctggctcttgccctcatcctggttctggaatcctcagttcaaggttatcctacgcagagagccaggtaccaatgggtgcgctgcaatccanacagtaattctgcaaactgccttgaagaaaaaggaccaatgttcgaactacttccaggtgaatccaacaagatcccccgtctgaggactgacctttttccaaagacgagaatccaggacttgaatcgtatcttcccactttctgaggactactctggatcaggcttcggctccggctccggctctggatcaggatctgggagtggcttcctaacggaaatggaacaggattaccaactagtagacgaaagtgatgctttccatgacaaccttaggtctcttgacaggaatctgccctcagacagccaggacttgggtcaacatggattagaagaggattttatgttataaaagaggattttcccaccttgacaccaggcaatgtagttagcatattttatgtaccatggttatatgattaatc

SEQ ID NO: 7980 - DNA, 598 bp, Homo sapiens
  unsure (19): n=A,T,C or G
gcttctaggacaagagccnggaagaaaccaccggaaggaaccatctcactgtgtgtaaacatgacttccaagctggccgtggctctcttggcagccttcctgatttctgcagctctgtgtgaaggtgcagttttgccaaggagtgctaaagaacttagatgtcagtgcataaagacatactccaaacctttccaccccaaatttatcaaagaactgagagtgattgagagtggaccacactgcgccaacacagaaattattgtaaagctttctgatggaagagagctctgtctggaccccaaggaaaactgggtgcagagggttgtggagaagtttttgaagagggctgagaattcataaaaaaatttattctctgtggtatccaagaatcagtgaagatgccagtgaaacttcaagcaaatctacttcaacacttcatgtattgtgtgggtctgttgtagggttgccagatgcaatacaagattcctggttaaatttgaatttcagtaaacaatgaatagtttttcattgtaccatgaaatatccagaacatacttatatgtaaagtattatttatttgaatctacaaaaaacaaca

SEQ ID NO: 7981 - DNA, 450 bp, Homo sapiens
  unsure (414): n=A,T,C or G
ctagtcttaaaaaatatgatagtttctctactaaagtctaaaaaacaaatctgtgctatttaaagaaagctgaaaaaatctgttttatcaaataggtttcacattagttttttcaacaactctcaaatgactatagttttttttctaaataagtataaccaattacatggtatgatgacccttacttgtgacactagtgtctccctagaatagctttttgtctgtggatagagccaaagatgctagataaagttcaaattagggaaaataataaactcattcataaatcagaatcaaacttgtctctctgtgctaggttaagcattgctaatttaaataaaatctgcattaattgaaatatgctgaaaattttaagatatatttgcatttattatgatgcattttgcatcaganatattctattcttgatcaatatttctcaaatattgg

SEQ ID NO: 7982 - DNA, 603 bp, Homo sapiens
  unsure (20): n=A,T,C or G
  unsure (575): n=A,T,C or G
  unsure (588): n=A,T,C or G
ccatcggtgctgaaattgancattttaaatagtacagtaggctggtatacattaggaaatggactgcactggaggcaaatagaaaactaaagaaattagataggctggaaatgcttactttctgctctcattttctttcattttgtctgctgtctttttgaatgccaatactttcatttaaaatgttttgggagcacggcaacccaaaatgactgaacggtggtccaaaaatccaaaccaactgataattacttctcgaggtgataggaaaggcacaggaagttaggactttggctgaaatgatgaaaacacatgttcgccattttagggatcagcgcctcgactcctgccacctccggctccaacgatgatcatgtttggatgtatttattgaattgtcctttgctgatgaggaatttttaaagtatttcatagaataagtcctttggtatgcagatgctacatggaaggaaagaaagaaaaaaagaaaacacacaatattacttgctccataccctaaactgccgataccacagccgtaaaatgaaggtgtctagtagttgttatagcacggnagtccattctttntaaaggaccacttac

SEQ ID NO: 7983 - DNA, 155 bp, Homo sapiens
  unsure (148): n=A,T,C or G
  unsure (153): n=A,T,C or G
ctgagggctcaggtgagcaactggtcacagtcagcagctctgttgttccagtgcttcccagtgctgtgcaaaagttttctggtacagcttcctccattatcgacgaaggattgggagaagtgggtactgtcaatgaaattgatagaanatccncc

SEQ ID NO: 7984 - DNA, 603 bp, Homo sapiens
  unsure (11): n=A,T,C or G
  unsure (557): n=A,T,C or G
  unsure (599): n=A,T,C or G
ctgataatttncaatgtcataaagtttccagtttcacaatacaaaaaggataaaatgaaattgggtatcattttgttgcaatttatagaactttacccatacctgtaagaccctcaatgtatatgaaatcattttcactgggaaagtgacagttacagtaaaagcagaaccacacaaatctttatttaaaagccgaaatatcagccttctctctctcttttgctatttgaaaggtagtcttcaatttggcaggcaactgcttctctctccaaatagtaacaggttacaaacatgctactttaaatatgaataggacctaaggctttagtattttaaatcttgcccaatacagaaatgcctttcaagagactttagtgatgcttaatttatgaacaacaaggaattattttccttttgattattcactttttcaaaactcatagatcagaataaacaaaaaatcccccaacccatggtggggacacaaaagtaacataagtgactaaggtgtgccattcatagagaggttgaagactccatgccccaggaccacttanctgcaatagggtgaaatagtctactttttgatttcatgaatntttt

SEQ ID NO: 7985 - DNA, 489 bp, Homo sapiens
  unsure (13): n=A,T,C or G
  unsure (14): n=A,T,C or G
ccttatttctctnntcctttcgtacagggaggaatttgaagtagataggaaccgatctggattactccggtctgaactcagatcacgtaggactttaatcgttgaacaaacgaacctttaatagcggctgcaccatcgggatgtcctgatccaacatcgaggtcgtaaaccctattgttgatatggactctagaataggattgcgctgttatccctagggtaacttgttccgttggtcaagttattggatcaattgagtatagtagttcgctttgactggtgaagtcttagcatgtactgctcggaggttgggttctgctccgaggtcgccccaaccgaaatttttaatgcaggtttggtagtttaggacctgtgggtttgttaggtactgtttgcattaataaattaaagctccatagggtcttctcgtcttgctgtgttatgcccgcctcttcacgggcaggtcaatttcactggttaaaagtaaga

SEQ ID NO: 7986 - DNA, 392 bp, Homo sapiens; identical to SEQ ID NO: 7567

SEQ ID NO: 7987 - DNA, 367 bp, Homo sapiens
gcggcgaccatggcgtatcacggcctcactgtgcctctcattgtgatgagcgtgttctggggcttcgtcggcttcttggtgccttggttcatccctaagggtcctaaccggggagttatcattaccatgttggtgacctgttcagtttgctgctatctcttttggctgattgcaattctggcccaactcaaccctctctttggaccgcaattgaaaaatgaaaccatctggtatctgaagtatcattggccttgaggaagaagacatgctctacagtgctcagtctttgaggtcacgagaagagaatgccttctagatgcaaaatcacctccaaaccagaccacttttcttgacttgcctgttttgg

SEQ ID NO: 7988 - DNA, 485 bp, Homo sapiens
  unsure (20): n=A,T,C or G
  unsure (53): n=A,T,C or G
  unsure (54): n=A,T,C or G
  unsure (263): n=A,T,C or G
  unsure (266): n=A,T,C or G
  unsure (326): n=A,T,C or G
  unsure (375): n=A,T,C or G
  unsure (379): n=A,T,C or G
  unsure (409): n=A,T,C or G
  unsure (444): n=A,T,C or G
  unsure (453): n=A,T,C or G
  unsure (454): n=A,T,C or G
  unsure (472): n=A,T,C or G
ctgcaaaaaccacttcaggntcctagctctatttctagagctgtcttgtccannacagtggctgctacccacctgtggctcttgagcacctgaaaggtagatagtgcaaactgacatagtctttaagtgtaaagtacttgacaactttaaataagataataggaaaaaagaatgtaaaatttctcaataattttcatgtgggttacttattgaaacataataacttgaatacattaagtaaaatatattgttaaattactttnatntctttaatttcaattttttaaagatgcttacaattttatatggggttttcattatatttntattgaacagtgctattctacacacaagctcatcttccttaaatattgntggngcctccaaccatgattccatcacttctttncattggccaatttctttttttcttttttttgaatngagacatannttcactcttgtcacccangctggaatgcaat

SEQ ID NO: 7989 - DNA, 446 bp, Homo sapiens
  unsure (340): n=A,T,C or G
  unsure (341): n=A,T,C or G
  unsure (407): n=A,T,C or G
  unsure (421): n=A,T,C or G
  unsure (427): n=A,T,C or G
cctttcttaaacaacttactctgcattaaaaagtcatcaataagaactgtaattcagtgtttttaaaaatgaaatgtttaacttcaaattgtttgtttaaaataaactgctattgtgccaaataatgaaactactattttattcattacaaacatcatataatcattctctataatcactataaaaatttaaatgcttcctttctcctgtatatgaagatggtagttctaaagcaacactctaaaagtgttaaaaagcccattcgtaacacacaccccacctcagtttttgaaagtcagtgcattcagtggttataaataggcatgatgttcttccacanntaagagttctgagtgtcaatcagttgtgtttttttctcccaagggaagacgttcccataactggancaactgttcaccancctgangttctagttcctagataaa

SEQ ID NO: 7990 - DNA, 92 bp, Homo sapiens
  unsure (19): n=A,T,C or G
  unsure (21): n=A,T,C or G
ctcaggtgacactatggcnanattaacatctgggattaggactggaaacacatgtcattttgaactaagggaaactctttgtcatcctaatt

SEQ ID NO: 7991 - DNA, 88 bp, Homo sapiens
  unsure (23): n=A,T,C or G
  unsure (84): n=A,T,C or G
ctgggaagccacgagaatattgngaacctgctgggggcgtgcacactgtcaggaccaatttacttgatttttgaatactgttgntatg

SEQ ID NO: 7992 - DNA, 203 bp, Homo sapiens
cctttaagaattaagtgacttgtccaaggtcactatccgtattttaggagccaagacgagatcaagttcaatattccaggagtggtactgactagaccttgtagttattttgaaaatgttagcctccaattacaaaagcaagcatttcctagttctcactcaacttctccttttccctgttcctctcaaaaaaaaaaaaaaaa

SEQ ID NO: 7993 - DNA, 72 bp, Homo sapiens
  unsure (11): n=A,T,C or G
ctgaaccctcntggagccattcatacaggtccctaattaaggaacaagtgattatgctacctttgcacggtt

SEQ ID NO: 7994 - DNA, 577 bp, Homo sapiens
cctactcattattttagagaatgaatgaagcaacaaggaagagagaccatgactctatcgatgacactgtttatagaaacacaggagaggaagaatttggaatgaaaagcacttcgtcagaaccttctgtgggagccattgagagaaaagcatggtccagtgccttctgagaaaggccagagctttgggctttcctgctctgcttttgggtcgtcaatttgccatctctggttctgtgctataatcagaattgtaattatgttctccagaggccaatttcattaactctgattaattagaatcagctagccagattagtaacctctttgtccagccttgatttacagtgcagggtaaagtgcagaccttaaaaacagctaagtacctagaagagctccctgcaagtgtaaatattaaggatgacctgtgcaaaattatacccacaccagcactagtggtaattattctaaattattgccaaaaagttttttttaatctgtctttcaagtttacagaaaagaaagcagtaaatgcattgatgtcattttattatgtacatatatcatgtgcattcaag

SEQ ID NO: 7995 - DNA, 186 bp, Homo sapiens
cctttccactaaccctgaaaaagatatatttgtggtgcgggaaaatgggacgacgtgtctcatggcagagtttgcagccaaatttattgtaccttatgatgtgtgggccagcaactacgtagatctgatcacagaacaggccgatatcgcattgacccggggagctgaggtgaagggccgctgtgg

SEQ ID NO: 7996 - DNA, 236 bp, Homo sapiens
  unsure (216): n=A,T,C or G
cttacgtttagtgagggagagatttggtatatgattgagatgggggctagtttttgtcatgtgagaagaagcaggccggatgtcagaggggtgccttgggtaacctctgggactcagaagtgaaagggggctattcctagttttattgctatagccattatgattattaatgatgagtattgattggtagtattggttatggttcattgtccgganagtatattgttgaagaggat

SEQ ID NO: 7997 - DNA, 388 bp, Homo sapiens
  unsure (40): n=A,T,C or G
  unsure (375): n=A,T,C or G
  unsure (386): n=A,T,C or G
ctgaatttcacttttctttaaaaatttaatattaaaatgntttcatctcttaattattggcttgcttgcatggatcattcattaaataattttttatttgctagatacccataatatctgccgaacatctgactagccacaagtatgttacccagatgtagaattttcatcactaaacagtaagttcattatgtaatatatagttgcatatttgtggtggttttttttaagatagcaattgtatagtgcacttaaaattttgcgaaatctctgagaaaatatatacagatcacatttttatcttaaatgggtgtgaggaattttatcagacatctttataacaaatatgttaatatcacttaaatatacaaagtnctaagagaaanta

SEQ ID NO: 7998 - DNA, 388 bp, Homo sapiens
ctggcagaccccccaaccacatcagaggagttttcatttcttcctgggctgcttatctgggaagccttcaaagaattcgttacacatcatggcgatgcaggacaggaagacacagtactcttggaagtccacctcgttgtccctgttgctgtccaagttgctcatcagcttctggaaagcagcttcatctgtccttttccccaagaagctgggcagctcccgggtcagcagctcctttagttctgacttgttgagcttgaacttgtcaccctctttgcccgagtacttgtggaaggtggacaccatcacatccagggccttctccagagggcacgccatgacagcagtcaggatcaaaccaagaaagaagaagcgctgaggagagagg

SEQ ID NO: 7999 - DNA, 405 bp, Homo sapiens
  unsure (336): n=A,T,C or G
  unsure (352): n=A,T,C or G
cctggctcaacaaaagggctggggattggccctgaaaggagagagctgactgtcctggctgatggacaggagatcctcttagcactaccctaaggcaggcagttgggcattggtgtagacaacaggaaagtccaggctatagccgtactcaaaaacctttctgttccctttctgccagccctagggattgagtccacattcagcacaggactctctgggtacagctctctttaggaagacacaaattgcatggtgaagtcagttatatcctggccgcctttggtccctcccaggaagacgggcatgttttctgcttgagaggtgctgatgtgccanttggggaactgggcanactcaaattccagcttgttattgatttctatcttgttgaagacaaatcgcttt

SEQ ID NO: 8000 - DNA, 452 bp, Homo sapiens
cctgccttaccgagagccaaacagagcccagggagactccgctgtgggaaacctcattgttctgtacaaagtactagctaaaccagaaaggtgattccaggaggagttagccaaacaacaacaaaaacaaaaaatgtgctgttcaagttttcagctttaagatatctttggataatgttatttctattttttatttttttcattagaagttaccaaattaagatggtaagacctctgagaccaaaattttgtcccatctctaccccctcacaactgcttacagaatggatcatgtcccccttatgttgaggtgaccacttaattgctttcctgcctccttgaaagaaagaaagaaagaagactgtgtttttgccactgatttagccatgtgaaactcatctcattacccttttctgggtttgaagctgctgtctctagaagtgccatctcaa

SEQ ID NO: 8001 - DNA, 355 bp, Homo sapiens
gaagaacgtgagtaggccagatcagaaaagggagctcaggtaccttccagagagtgagacccagcgcccttgtctcgcacccagtaggctttcatccccgccatggcggagctgatccagaagaagctacagggagaagtggagaaatatcaacagctacagaaggacttaagtaaatccatgtcggggaggcagaaacttgaagcacaactaacagaaaataatatcgtgaaagaggaactggccctgctggatgggtccaacgtggtctttaaacttctgggtccggtgctagtcaaacaggagctgggggaggctcgggccacagtagggaagaggctggactatatcacag

SEQ ID NO: 8002 - DNA, 339 bp, Homo sapiens
ccagaggagggtcccatctgtcatccgcctggcactggctccagggactgccttccagagtatacccatcttcacacttcaaagtcacataatctccatagtgatatacttttttcatttctaactccttcgagattccattcataaacagtgggaagctacaatttacttctttgcaataatgatccaattggctccagattccctggtctgtacagaaaatgaagccctttcccactaacaggtagccggggtcacaaatgtagctgattgtcatcccaggaagatatagagatacgtgtcctccaatgtaatgcccgttttggatcttgggtggat

SEQ ID NO: 8003 - DNA, 393 bp, Homo sapiens
  unsure (354): n=A,T,C or G
  unsure (387): n=A,T,C or G
ccagtgtgaggtttgctccttcagcaaacctggaaggtaagaatggggcatatccacatccatagacccttttgtttccctcacagaattttgtgattttttttgtgtgtggcatttttgggggagcagggaacatcaactttgttgggggaaatttctctgcataccagcacgccagcgagggcagacggccttacacactggcctgtgaacatacctatttgttggcccgcttgtgtctgtacatctgcatcatcctctgtcggaacacatcgaatgtgtcttctttgtgctcctgcccgtcagcacccaacccttccccttccgagggggttcccctagggagtgaaaaanagagtcagttgtgcacctgagcccagggcctgncatgcc

SEQ ID NO: 8004 - DNA, 73 bp, Homo sapiens
  unsure (47): n=A,T,C or G
  unsure (64): n=A,T,C or G
  unsure (67): n=A,T,C or G
tcggcttgtcctggctcttgccctcatcctggttctggaatcctcanttcaaggttatcctacncanagagcc

SEQ ID NO: 8005 - DNA, 279 bp, Homo sapiens
gcacaaggcacaacaggctgctctgggattctcttcagccaatcttcattgctcaagtgtctgaagcagccatggcagaagtacctgagctcgccagtgaaatgatggcttattacagtggcaatgaggatgacttgttctttgaagctgatggccctaaacagatgaagtgctccttccaggacctggacctctgccctctggatggcggcatccagctacgaatctccgaccaccactacagcaagggcttcaggcaggccgcgtcagttgttgtgg

SEQ ID NO: 8006 - DNA, 271 bp, Homo sapiens
  unsure (130): n=A,T,C or G
  unsure (239): n=A,T,C or G
  unsure (242): n=A,T,C or G
  unsure (249): n=A,T,C or G
  unsure (250): n=A,T,C or G
  unsure (258): n=A,T,C or G
  unsure (262): n=A,T,C or G
ctgattgattgaatgcaatgtgattgattgattgattgattgatatataccaaaattcatatggatgtcacacagtgacagcattgtacaagtaacgttaatgacctccaacaaacacattttaaattanactggtcaagctaaaaggaatgttggagccaaaagaaatgtagtggaattcagattgtctattaagacttgaaactatacattagaatgatgtggaaccctaatactancancaactgnnacagcccncttnaaagatttg

SEQ ID NO: 8007 - DNA, 531 bp, Homo sapiens
  unsure (517): n=A,T,C or G
tgagtccaaacattctgaaaaccgtacaaatgtgtttacattttagtgggggcttcctgcatctttaacctctttaaattgacataggtaagatcttgtgtaataacacatttgcaaatatgcagatgcattttcaaatgaatataatctgatttagagaatattaactgactatcatagtagactatggataatactctaataattaattacaggttaacatttttaaaactcaaagcatatgctttaagtttatgctttaagccacgttatgttctacttcagcctaatacaagggagaaatttggagggggccctcctagctttctagtctcattattcccaaattagaaacattaccagcctaacactaactctggggtctaaaatgaagttattttggcagccctagagttttcttgtcattgataactgaagattggcctttgtgcaggttaaataatcaaatcttagaggaaattgacatgcttttaaattatctacaaatattagcccnttaaaagattatat

SEQ ID NO: 8008 - DNA, 449 bp, Homo sapiens; identical to SEQ ID NO: 7970
  unsure (13): n=A,T,C or G

SEQ ID NO: 8009 - DNA, 297 bp, Homo sapiens
cctgggtatctgaggcttgcttggcttgtgtccatgcttaaacccacggaagggggagactctttcggatttgtagggtgaaatggcaattattctctccatgctggggaggaggggaggagggtctcagacagctttcgtgctcatggtggcttggctttgactctccaaagagcaataaatgccacttggagctgtatctggccccaaagtttagggattgaaaacatgcttctttgaggaggaaacccctttaggttcagaagaatatggggtgctttgctcccttggacacag

SEQ ID NO: 8010 - DNA, 385 bp, Homo sapiens
ctggcagaccccccaaccacatcagaggagttttcatttcttcctgggctgcttatctgggaagccttcaaagaattcgttacacatcatggcgatgcaggacaggaagacacagtactcttggaagtccacctcgttgtccctgttgctgtccaagttgctcatcagcttctggaaagcagcttcatctgtccttttccccaagaagctgggcagctcccgggtcagcagctcctttagttctgacttgttgagcttgaacttgtcaccctctttgcccgagtacttgtggaaggtggacaccatcacatccagggccttctccagagggcacgccatgacagcagtcaggatcaaaccaagaaagaagaagcgctgaggagag

SEQ ID NO: 8011 - DNA, 398 bp, Homo sapiens
aatcgctgtcggatcgatacaggaaggactcccgtcgttgactgtggacaaaatttgcttggagaattagcccggatcctgggctggtcatgggatccaagggactccgtcccgcagatgtgccattgtccacatcaaaaccactggattctgcagaagtgatagcaatcagcggcagaatcttcagggggaggctggttggtcgttgaatgttctctgattcacttttcaagtcagcttgttccaactgtctgaaggcgagagggggaagctgaatattgcgacatgaaagtctccggacaagatagggttccattccgcggaaagggtcttcctcttcattactggaatgtagtgtttcctcagaggcacttttgctccgagaaagcaaatcacag

SEQ ID NO: 8012 - DNA, 278 bp, Homo sapiens
  unsure (5): n=A,T,C or G
  unsure (10): n=A,T,C or G
  unsure (21): n=A,T,C or G
aggtntgacntcctaaaaacnaagtcaaattagggaaggatggccgtttccttgagtcaaaagcccagcaggattgcattataatgtatatttcttctgcagcataaaatggctgatccattttaaatccattttgaatcagtttgtagaagttagcatcaaccggaatgccagggtaaggattcacaccaagtgagaagatttcccacagtaatattccatatgaccagacatcactcttaatggtgtagatgccttcaaacaggctttcgggggcc

SEQ ID NO: 8013 - DNA, 305 bp, Homo sapiens
  unsure (275): n=A,T,C or G
  unsure (291): n=A,T,C or G
ccaatatgcctttggagcacagcctatggtttatgtttcttttatgaccacctttaatatctgtcaaacgactagacatgctatagctttacccgaaggtaatttgattgactgtgctctgctagaagatggtgtatgggtccctctcgaggtaactgccaataaatgataagtggtatttgttttagataatgcctctacctcagtggtagctttgataatggcaaattgtaattgcaagtgccattttcagaataggcattggtttattttangaagaggataataaanttccttttagttat

SEQ ID NO: 8014 - DNA, 231 bp, Homo sapiens
ccatcatccatgaagaaaaggcactgaccatggaagtgatccgccaggtgaagggagacctggccttcctcaacttccagaacaacctgcagcagactccactccacttggctgtgatcaccaaccggccagaaattgctgaggcacttctgggagctggctgtgatcctgagctccgagactttcgaggaaatacccccctacaccttgcctgtgagcagggctgcctgg

SEQ ID NO: 8015 - DNA, 157 bp, Homo sapiens
  unsure (119): n=A,T,C or G
  unsure (128): n=A,T,C or G
ctggtgttaatggcatgcaggcatatgtgatgccaaccatgagggctggaagaaccagaagccaaagaagaatatgaccgcatctattctaaagctactgtggtggtttctcatgcttnagagtctcntaagtctcctggttcctggtgctcaggcc

SEQ ID NO: 8016 - DNA, 262 bp, Homo sapiens
  unsure (162): n=A,T,C or G
  unsure (248): n=A,T,C or G
  unsure (251): n=A,T,C or G
ccaacatggtgaaaccccagctctattaaaaataatagaaaaattagccaggcgtggtgacatgtgcttgtaggcccagctactcgaggctgaggcatgagaatcgcttgaacccatggaggtggaggttgcagtgccactgcactccagtctgggtgacanagcaagactccatcccaaaaaataaaaataaaactctaggtggaggcttaatcttttctttaaatcagcttcttagagcactctanaantcatctgtaac

SEQ ID NO: 8017 - DNA, 288 bp, Homo sapiens
ctgttgagaatatactgtagggggtgaggatggaagtgagggtggtatttggaaggctagtgcaataatccaggcaagaaatgaattaaatggtttgagtagggtgaaagcagttgttctgcatgtattttgaaggaaaacccaccaagatttgctgaaagattaaatgtgaaatacaagagaaaaagagaaatcggccgggcatggtggctcacacctgtaatcccagcactttgggagaccgaggtgggtggctcacctggggtcaggagttcgagactagcctgg

SEQ ID NO: 8018 - DNA, 309 bp, Homo sapiens
  unsure (42): n=A,T,C or G
  unsure (134): n=A,T,C or G
  unsure (185): n=A,T,C or G
  unsure (207): n=A,T,C or G
  unsure (210): n=A,T,C or G
  unsure (218): n=A,T,C or G
  unsure (221): n=A,T,C or G
  unsure (230): n=A,T,C or G
  unsure (231): n=A,T,C or G
  unsure (248): n=A,T,C or G
  unsure (256): n=A,T,C or G
  unsure (267): n=A,T,C or G
  unsure (276): n=A,T,C or G
  unsure (297): n=A,T,C or G
  unsure (298): n=A,T,C or G
cgcgtaggcgagttggtctgaaagcccccggtatcattcctngaatttcagtgcgggaaccaatgcagactggcattaaggctgtggatagcttggtgccaattggtcgtggtcagcgtgaactgattattggngaccgacagactgggaaaacctcaattgctattgacacaatcattaaccanaaacgtttcaatgatggatctnatnaaaagaanaanctgtactgnntttatgttgctattggncaaaaganatccactgttncccagttgntgaagagacttacagatgcannatgccatgaag

SEQ ID NO: 8019 - DNA, 620 bp, Homo sapiens
  unsure (480): n=A,T,C or G
  unsure (500): n=A,T,C or G
  unsure (503): n=A,T,C or G
  unsure (509): n=A,T,C or G
  unsure (598): n=A,T,C or G
tttagattatattcgataaaagtaattggactttttttctttttttgactcgttgacaagtgtctttgtaatatgtttttagttccctttttttgttgtattataggcagatgaacaaattaaatttggcctcaaagagagaacttactcccttctggatatttttgccacatttctttgcaaaaggagatatatatatctttagtcagttttgttgttatgagaaattatgggttattttgtggcatgctctttgggagctgcacagttatggggaggactcccactgctgtgcaagttaagtcttttacaaaacaaggacagcagaggagggtttgcagagacctccctctgaaaaacacaaagaatggactctctcctgggatgaggacttgctttctttacctccggttctttccatgtcttagttggatgtccctgaaatggacacaggctgtgccattgtgccagaaacattgngttatcttttatgttgttgntgntgctgntaaactataatatgtgacttctttttttattattttttggttgaatgctttaaaaatcttttaagtctgtggatctgctgatgtacagngcctttgctgctatggatcaaa

SEQ ID NO: 8020 - DNA, 446 bp, Homo sapiens
ctggtgcttctgccttaccccatcctctcctctcagattcaccgaggactgttcaggtggtaacattctcttagggtagggaactctgcagagggagagctgaggaggttccggccatagttgtttgtaatcttagggctctgggcttggctgaaacatgacggtattgcttggtttcaggcttgacactgccaggcgcctattgcttgacctctgtttaaatgagggacttcaagactagacagcatggctcttttcagtttattgcatgaaggagttacactagtccaagttaaaagcggaccccaaatggttacattatacaagctgtgaggtttttaaacctgtgacaagggagagaagggaaattctactcattgcaaggaaatcctcacttaagcttcagtgagccacaagcacttaaaacccatgaaccttcagacctc

SEQ ID NO: 8021 - DNA, 609 bp, Homo sapiens
  unsure (566): n=A,T,C or G
  unsure (572): n=A,T,C or G
  unsure (591): n=A,T,C or G
  unsure (592): n=A,T,C or G
ccaatgaaatttgaacatcactaaacaagcaaatggaatgactttggaccatatctagtatataatatttttgtcacgcacctgctgcattgctctaacttacacagaatgagaggagtaaatgttcttgccttcaaatagtgttttacgttttttatcctgctgaaaaagtatatataaaatatctaacattacaggatagaggttcagtttcttaaaaaattaaagctgctaaaattgagtggttaaaaaagataccttatcctattcctccccacccacccatgtttttaaactaatttatataaaatctggaggctgttacagctaacaaagcaggtgtgtggcagaaatattactttaaatttgtcttgtgagattttactatatctcagacagcataaatgctgttttagcactggattctttcactgagcacaaagagttgttggggctttagcatctgactgattttgttacggggttgattctgaccataggaagtatgcaatgtgaatcactatttacagagaaacctacaacaggatgcttgatgttgtagaaanctgggnacatataggataccaagcnnaaattataagaaaccta

SEQ ID NO: 8022 - DNA, 252 bp, Homo sapiens
  unsure (55): n=A,T,C or G
  unsure (124): n=A,T,C or G
  unsure (180): n=A,T,C or G
  unsure (240): n=A,T,C or G
tcttacaggcagaaactcttagagctcacaaattggaaacaactgcaaacttcanagtaaattcatagcttccaaatacaaatgttcacattgtccctccgctatttttacacaaatgcattcnggtgaagacagcaacacacattgggaaaggacatctgcttcctattttagtcccanaatcacttttgcttctagtcccaactgttccctctccccaatcccaaccttatccatgtnacagtatgaatt

SEQ ID NO: 8023 - DNA, 342 bp, Homo sapiens
cctgtttgattgtagctatgttggtgtatctcgtgtacaagatggaaaagtgcttttgttgttctacctgatccagttgggggagcaggaatagggggtgcctgcctaacggcctctagcccatgtgcttatactgggatctgtcccgagggatctgcacctggttggcagtcattttgtggtggacgtggtaaatcgcgagtgttaccatgatgacgaggcccaagatgagccccaaaatcaggggcaaggtttcttccagttgctcccgctcatccactgggcatttatgctcttcactgaagacaaaatctgagataatgtcaaaaggttggatgtgga

SEQ ID NO: 8024 - DNA, 274 bp, Homo sapiens
ccttggtcctagcacccactcgagaattggctcagcagatacagaaggtggtcatggcactaggagactacatgggcgcctcctgtcacgcctgtatcgggggcaccaacgtgcgtgctgaggtgcagaaactgcagatggaagctccccacatcatcgtgggtacccctggccgtgtgtttgatatgcttaaccggagatacctgtcccccaaatacatcaagatgtttgtactggatgaagctgacgaaatgttaagccgtggattcaagga

SEQ ID NO: 8025 - DNA, 178 bp, Homo sapiens
  unsure (131): n=A,T,C or G
  unsure (134): n=A,T,C or G
  unsure (150): n=A,T,C or G
  unsure (172): n=A,T,C or G
  unsure (173): n=A,T,C or G
ctgtttcatagtcattgttggtttcttcaggttgtctctttctgatggcaatcatttgacgtccaggtggctcaaattgggcagccttcacaggatcagtggaattggctgaaatccgctttttcctgcantanatcaaggccactacancagcaacaatggccagctacannaatcc

SEQ ID NO: 8026 - DNA, 321 bp, Homo sapiens
gggacgctctcagctctcggcgcacggcccagcttccttcaaaatgtctactgttcacgaaatcctgtgcaagctcagcttggagggtgatcactctacacccccaagtgcatatgggtctgtcaaagcctatactaactttgatgctgagcgggatgctttgaacattgaaacagccatcaagaccaaaggtgtggatgaggtcaccattgtcaacattttgaccaaccgcagcaatgcacagagacaggatattgccttcgcctaccagagaaggaccaaaaaggaacttgcatcagcactgaagtcagccttatctgg

SEQ ID NO: 8027 - DNA, 241 bp, Homo sapiens
ccaagggtcatgatggcaggagtaatcagaggtgttcttgtgttgtgataagggtggagaggttaaaggagccacttattagtaatgttgatagtagaatgatggctagggtgacttcatatgagattgtttgggctactgctcgcagtgcgccgatcagggcgtagtttgagtttgatgctcaccctgatcagaggattgagtaaacggctaggctagaggtggctagaataaataggag

SEQ ID NO: 8028 - DNA, 428 bp, Homo sapiens
ctgtggtttattctgcttgtatgtctgcacaggccggatgctcgtgttccttgtcttattctccatttactcagtcactggggctcactcccgtctgatgcactagccaagattgccttagtgtgctccagaaaagaaggccaaatcccaggcattgtcagggcagcagagctctacaggataggcttacctttcccacctgtgtggctagcacttcacagtttacaaattcctcccacctccactcagtgacacatgctgttctaacacaggtcaggcaggcattacagtccccatgttcagaatcaaagacctagcctcagagaagtgaagaaacatcatgccaaggtcattgactgccaagcggtagaggtggggttgcatccagagagcttcccggtatgcctctgcacaatgccattccttgg

SEQ ID NO: 8029 - DNA, 383 bp, Homo sapiens
ccatggacaagctgaggaagatgctggttccctgcccacagacctttcaggagaatgacctgagcaccttctttcccttcatctttgaagaagaacctatcttcttcgacacatgggataacgaggcttatgtgcacgatgcacctgtacgatcactgaactgcacgctccgggactcacagcaaaaaagcttggtgatgtctggtccatatgaactgaaagctctccacctccagggacaggatatggagcaacaagtggtgttctccatgtcctttgtacaaggagaagaaagtaatgacaaaatacctgtggccttgggcctcaaggaaaagaatctgtacctgtcctgcgtgttgaaagatgataagcccactctacag

SEQ ID NO: 8030 - DNA, 529 bp, Homo sapiens
  unsure (517): n=A,T,C or G
  unsure (526): n=A,T,C or G
cgccttttacttcggcccgcttcttctggtcactccgccaccgtagaatcgcctaccatttggtgcaagcaaaaagcaatcagcaattggacaggaaaagaatggcattgaagcagatttccagcaacaagtgctttgggggattgcagaaagtttttgaacatgacagtgttgaactaaactgcaaaatgaaatttgctgtctacttaccaccaaaggcagaaacaggaaagtgccctgcactgtattggctctcaggtttaacttgcacagagcaaaattttatatcaaaatctggttatcatcagtctgcttcagaacatggtcttgttgtcattgctccagataccagccctcgtggctgcaatattaaaggtgaagatgagagctgggactttggcactggtgctggattttatgttgatgccactgaagatccttggaaaaccaactacagaatgtactcttatgtcacagaggagcttccccaactcataaatgccaattttccagtggntccccaaangat

SEQ ID NO: 8031 - DNA, 382 bp, Homo sapiens
ctggagtgaaggctggatacactaattcttttaaacaagtgcccattatcacattttgcatttttgagtgcttctgagttgaaaattaaaaccatgaaatttgaactgcgttttatttttcacctgctgaaagaacaggatcctacagcaattaaaaaacaatcacataacaactatagctacagtgtgctgtttggtttgcctgtttatgatttaaattttgtgaaagtcaatacttgttttgaagatttttttgtgaacaataaaccactgaaattggcagaaactgatctgaataatatatgttcttagtatagttctttctctctttttttgttgaagttttaaacatgcagtagttttgaaaaatgtaaggaatatc

SEQ ID NO: 8032 - DNA, 508 bp, Homo sapiens
  unsure (491): n=A,T,C or G
ctgccgctgctcgttgttttttctgcaatgatatttgggactattacaaatcaagatctgcctgtgattaagtgtgttttaatcaatcataagaacaatgattcatcagtggggaagtcatcatcatatcccatggtatcagaatccccggaagacctcgggtgtgcgttgagaccccagagctcagggacagtgtacgaagctgccgctgtagaagtggatgtatctgcttccatcacactgcaagtgctggtcgatgccccagggaacatttcctgtctctgggtctttaagcacagctccctgaattgccagccacattttgatttacaaaacagaggagttgtttccatggtcattttgaaaatgacagaaacccaagctggagaatacctactttttattcagagtgaagctaccaattacacaatattgtttacagtgagtataagaaataccctgctttacacattaagaagaccttactttanaaaaatggaaaaccagg

SEQ ID NO: 8033 - DNA, 394 bp, Homo sapiens
ccaggacagcctgtacttctgttgaggagtttcaagtttttaagaagctcctggctcgggaggaggaggagtctgagagcagcacatctgatgacaaaagggcaagtctggatgaggatgaggatgacgatgatgaggaggacaatgatgaggatgacaatgacgaggatgacgatgatgaggacgacgacgaggcggaggacaatgatgaggatgaggacgacgacgaggaggaatagctgtgatggaaggactagagcgaaagggcccagagatatcaaggaagcttttcattctcttaaagcttttgggtcctttacttgaatcttctcaagttattttttattctaaaactggtctcttgatgaaaaaaattataagtcacctgagaggc

SEQ ID NO: 8034 - DNA, 550 bp, Homo sapiens
  unsure (128): n=A,T,C or G
ccttggtcctagcacccactcgagaattggctcagcagatacagaaggtggtcatggcactaggagactacatgggcgcctcctgtcacgcctgtatcgggggcaccaacgtgcgtgctgaggtgcanaaactgcagatggaagctccccacatcatcgtgggtacccctggccgtgtgtttgatatgcttaaccggagatacctgtcccccaaatacatcaagatgtttgtactggatgaagctgacgaaatgttaagccgtggattcaaggaccagatctatgacatattccaaaagctcaacagcaacacccaggtagttttgctgtcagccacaatgccttctgatgtgcttgaggtgaccaagaagttcatgagggaccccattcggattcttgtcaagaaggaagagttgaccctggagggtatccgccagttctacatcaacgtggaacgagaggagtggaagctggacacactatgtgacttgtatgaaaccctgaccatcacccaggcagtcatcttcatcaacacccggaggaaggtgga

SEQ ID NO: 8035 - DNA, 337 bp, Homo sapiens
  unsure (156): n=A,T,C or G
  unsure (168): n=A,T,C or G
ctgtttcatagtcattgttggtttcttcaggttgtctctttctgatggcaatcatttgacgtccaggtggctcaaattgggcagccttcacaggatcagtggaattggctgaaatccgctttttcctgcagtagatcaaggccactacagcagcancaatggccgctncagcaatcccagtgaccacagccacaatgatccccatcggtgaagagctgggagcttggacagtgatggtcacaggcttggatgagtacagcgtgtagcctatgtttcctgtgcagtggtaatcaccactgtgactgtggtttgcttgtgggatggagaagttgggatc

SEQ ID NO: 8036 - DNA, 449 bp, Homo sapiens
ctggagagtgtagatcccaaaaattacccaaagaagaagatggaaaagcgatttgtcttcaacaagatagaaatcaataacaagctggaatttgagtctgcccagttccccaactggtacatcagcacctctcaagcagaaaacatgcccgtcttcctgggagggaccaaaggcggccaggatataactgacttcaccatgcaatttgtgtcttcctaaagagagctgtacccagagagtcctgtgctgaatgtggactcaatccctagggctggcagaaagggaacagaaaggtttttgagtacggctatagcctggactttcctgttgtctacaccaatgcccaactgcctgccttagggtagtgctaagaggatctcctgtccatcagccaggacagtcagctctctcctttcagggccaatccccagcccttttgttgagccagg

SEQ ID NO: 8037 - DNA, 383 bp, Homo sapiens
ccatggacaagctgaggaagatgctggttccctgcccacagaccttccaggagaatgacctgagcaccttctttcccttcatctttgaagaagaacctatcttcttcgacacatgggataacgaggcttatgtgcacgatgcacctgtacgatcactgaactgcacgctccgggactcacagcaaaaaagcttggtgatgtctggtccatatgaactgaaagctctccacctccagggacaggatatggagcaacaagtggtgttctccatgtcctttgtacaaggagaagaaagtaatgacaaaatacctgtggccttgggcctcaaggaaaagaatctgtacctgtcctgcgtgttgaaagatgataagcccactctacag

SEQ ID NO: 8038 - DNA, 626 bp, Homo sapiens
tgacatcaaggactcaaaagcttattaccacctgcttgagcaggtggctccaaaaggagatgaagaaggtgttcctgctgttgttattgacatgtcaggactgcgggagaaggatgacatccagagggcagaatgcatgctgcagcaggcggagaggctgggctgccggcagtttgtcacagccacagatgttgtccgagggaaccccaagttgaacttggcttttattgccaacctctttaacagataccctgccctgcacaaaccagagaaccaggacattgactggggggctcttgaaggtgagacgagagaagagcggacatttaggaactggatgaactccctgggtgttaaccctcgagtcaatcatttgtacagtgacttatcagatgccctggtcatcttccagctctatgaaaagatcaaagttcctgttgactggaacagagtaaacaaaccgccataccccaaactgggaggcaatatgaagaagcttgagaattgtaactacgcggtagaattggggaagaatcaagcgaagttctccctggttggcatcggtggacaagatctcaatgaaggaaaccgcactctcacactggccttgatttggcagctaatga

SEQ ID NO: 8039 - DNA, 388 bp, Homo sapiens
ctgcttcaggggaaggcttgtggcttatatctattttgttgtattcctctagttcaacatgtctgcccccacccttacttctaacacctctgcccactccagtattccctcagaacctagcctggtaacgaatatatggacaattaaattacatcccaacatcattcatactttaatatataagaaatcagagcagagaatcagggcagccagtccctgaaggaaaagtctgtgacaaatcacaagtatgatcacagcacgaacttttctattctagcctggcctctaggaagaaaacagagagtgttaccggacttagggggaaaaaggacatgcttgatgaaggacagaaccccattgttctccacatttcctggctcacagaagg

SEQ ID NO: 8040 - DNA, 198 bp, Homo sapiens
cctgaaatacgttcagcacacctacaggactggggtgaaagtggataaagcaacatttatggttggcagctatggacctcggcctgaggagtatgagttcctcactccagttgaggaggctcccaagggcatgctggcccgaggcacgtaccacaacaagtccttcttcaccgacgatgacaagcaagaccacctcag

SEQ ID NO: 8041 - DNA, 344 bp, Homo sapiens
  unsure (12): n=A,T,C or G
  unsure (13): n=A,T,C or G
  unsure (318): n=A,T,C or G
  unsure (319): n=A,T,C or G
gttaaacactannttaaaaaattttaaaatgaatgatgccacatttctatataaagaaatgagcattattaatccctgttgttgtaaaacatcattgaaattgtatgctattctctttatataaagtcattctaattatgtcacatgttgaagatgtaaccaaactattataaaggctgcttatccattcacatattgaatagattaagtttgggttttttaagattgttaatttgttattttctctttcctctagtcaaagtgggaaaaagcccaccggtgaggggctccctctctggaaaagtcagcctaccttgnnatttttcaacgatgcatactttgcc

SEQ ID NO: 8042 - DNA, 480 bp, Homo sapiens
ctgcagatgtgctggctcctgagggacccgggggcttactctgctcttgggacaccttattccttttggcttcagtcttttctttgtttggagtttttcttttctgagctacaggaatcctccctcttgcttccgatgtcagtttgtttcttgcggtgggtgcaggtgccgcaagacccacttcttcctggtttatttttttcactggagctttttcttgtgttttaattttcttagcaacttttgacttctcttttcgaagattgttaacaaggtttttaagtgatggcatatctttggcaagttctattagtttgtctagacaggcaacgccttggaactttttttccatcaaatctgtaatcttaattctgttgtattcctcttgcatttttgtagttagtcctaaatcataggccagtaaggacttaattgatgtaaaatgataatcatccatgagctcaaatcctttcagcaaaa

SEQ ID NO: 8043 - DNA, 549 bp, Homo sapiens
ctgttttcctgttggaaagagctctttgatggacccctttccatccacccttattaggtagtagtctctcttgaaacccacacagatagaattttcacaccacgccatggacttgggcacatctggcacactaaagtccccctgcaattcatgaaattccctgtccttccagaaatagagctgcagcttcttttttactgccacacacatccgtaacacctcctcaccggtctctgtgtgctggaggtcacaagtaaacagtgatgctccctttgcctttgaaaccgtagtgatttgttgaaatgtcaataggtcatggacataaatgttattttctgtttgggaggaggtataacatcaggatcaatgatcataattctctagcatagccactatcgaggcaaaaaaagtaactgtgttaacatctagaagaagcaaatggcagatgttggttgaagatgtcccttcagtttcactaggatgattcattctcacctataaccagtacaaagcatttaagaggtcacttggtcttctaaacttggatat

SEQ ID NO: 8044 - DNA, 444 bp, Homo sapiens
ccagttttgaggatcagaggaagaaaggcttcctctgtgacattactttaatcgtggagaatgtacatttccgggcccacaaagccttacttgctgccagtagtgaatacttctcaatgatgtttgcagaagagggggaaatcggccaatccatttatatgctggaaggcatggttgcagacacctttggtatcctgctggaatttatctacacaggttatctccatgccagtgagaaaagtacagaacaaatcctggctactgctcagttcttaaaagtctatgacctggtaaaggcttacacagacttccaaaataatcatagctccccaaagccaacaactttgaacactgctggtgccccagtggttgttatctctaataagaaaaacgatcctccaaagcggaaacggggaagaccaaaaaaagtcaatacattgcagg

SEQ ID NO: 8045 - DNA, 258 bp, Homo sapiens
  unsure (257): n=A,T,C or G
gaagaggcagaataaaccaagcctgggacacctccctcctgtctaggtgtactcattcttctgtttcaaaagaaggcaaggacatgaagtcaacttctacctatcttctgctgctggtgtcttatgtattctcagtttgacctgattcctcttctgtcttttgacttaacattaggggttcttggtcataacctgctctgatgtacataaagatttcaggttcaatatcaatgtgtcttaaaacagaagtattttanc

SEQ ID NO: 8046 - DNA, 496 bp, Homo sapiens
gaaatttttccttaagtgtctggtgatccctggatttctgctcataattaaggaaaagaatgctgactcactggacccaggcagggcttctctcccagattgcaggcttgcctcggggatacacgggtttcccaaatgctagaatgaaaagagattttattttggcttgctaacatcaaagatactagtttctccagatggtttattcagaacactgttgtcttatttttatttgtctgagattaaatgtcttcccctttaattaaagggaggtctctgatgaagtaggtttgggaactgctaccttggtgacagcttgagtctttcctttagtgaagtgcagcacaattccacgtgctcggtgaccttctcttgattagggtgccttggaatgtacagaacctaacttgaatatacagcactggtttcttggataagaagtgtacagtgatctaaacttgcaaaccaaaatacagagatgatgggaccaaaaatt

SEQ ID NO: 8047 - DNA, 605 bp, Homo sapiens
  unsure (542): n=A,T,C or G
  unsure (592): n=A,T,C or G
ctgggaagccacgagaatattgtgaacctgctgggggcgtgcacactgtcaggaccaatttacttgatttttgaatactgttgctatggtgatcttctcaactatctaagaagtaaaagagaaaaatttcacaggacttggacagagattttcaaggaacacaatttcagtttttaccccactttccaatcacatccaaattccagcatgcctggttcaagagaagttcagatacacccggactcggatcaaatctcagggcttcatgggaattcatttcactctgaagatgaaattgaatatgaaaaccaaaaaaggctggaagaagaggaggacttgaatgtgcttacatttgaagatcttctttgctttgcatatcaagttgccaaaggaatggaatttctggaatttaagtcgtgtgttcacagagacctggccgccaggaacgtgcttgtcacccacgggaaagtggtgaagatatgtgactttggattggctcgatatatcatgagtgattccaactatgttgtcaggggcaatgncccgtctgcctgtaaaatggatggcccccgaaagcctgtttgaaggcatntacaccattaaga

SEQ ID NO: 8048 - DNA, 341 bp, Homo sapiens
  unsure (298): n=A,T,C or G
  unsure (305): n=A,T,C or G
  unsure (318): n=A,T,C or G
cctgtttgattgtagctatgttggtgtatctcgtgtacaagatggaaaagtgcttttgttgttctacctgatccagttgggggagcaggaatagggggtgcctgcctaacggcctctagcccatgtgcttatactgggatctgtcccgagggatctgcacctggttggcagtcattttgtggtggacgtggtaaatcgcgagtgttaccatgatgacgaggcccaagatgagccccaaaatcaggggcaaggtttcttccagttgctcccgctcatccactgggcatttatgctcttnactgaanacaaaatctgagntaatgtcaaaaggttggatgtgg

SEQ ID NO: 8049 - DNA, 390 bp, Homo sapiens
ccttggatgcagatcaatgctccaataaagttcattatcagctcctcctgccttgtgacaggatgatttgattttacaaaagtccctttgaaaacaagagtaaacgcagacagcttctagagaaaagtctggtgaagcagcagttgataatagattttcttttagtgatgaaattaatcttgttttggtaatctacagcctgttagggataggtggagggatgaagtccttaaaactaaattgttcctctacgaatcttcgacctgagcctgcggagagagtagccccaaatccatctctctgctgaaaggtcgcctgttttggtaggtgtgaggacattccgaaacacggccatccacattctgatacatcgcttcttctgcatctgcc

SEQ ID NO: 8050 - DNA, 630 bp, Homo sapiens
  unsure (596): n=A,T,C or G
  unsure (609): n=A,T,C or G
  unsure (611): n=A,T,C or G
cctctggcctcctgttcgcctcctctacaatttgccattgtttctcctgggttaggccccggcttcactggttgagtgttgctctctagtttccagaggcttaatcacaccgtcctccacgccatttccttttccttcaagcctagcccttctctcatcatttctctctgaccctctccccactgctcatttggatcccaggggagtgttcagggccagccctggctggcatggagggtgaggctgggtgtctggaagcatggagcatgggactgttcttttacaagacaggaccctgggaccacagagggcaggaacttgcacaaaatcacacagccaagccaatcaaggatggatgcagatccagaggtttctggcagccagtacctcctgccccatgctgcccgcttctcaccctatgtgggtggggccacagactcacatcctgaccttgcacaaacagcccctctggacacagccccatgtacacggcctcaagggatgtctcacatcctctgtctatttgagacttagaaaaatcctacaaggctggcagtgacagaactaagatgatcatctccagtttatagaccagnaaccagagctcananaggctagatgattgattac

SEQ ID NO: 8051 - DNA, 553 bp, Homo sapiens
attgctctttttcagctttatttttaagagtacagtcaggaaaccaacaaggggcctaagagtggctgcccctgcttgggacattacagcaagtgaaacaaagttaatgtgacaagctttgctttgttatcattggtcttcactagaggataccttttacatgtacttctctcttggatcaaatatgtctttaactgtacatctcagtggctggaggccatgccttttaagcatgtgtaaaatttttaaagaaatgaacatacacatagttattttagtaatatttcctgaaagaaaaaccaaattctgctataagtcttgatcttcaatgaacttttaaataatgcatttagctggaaaacaagactttcccagcttgtattacctagaagcgtgaatgtataggatacctgactactaagactatattctcagccctgccctgtcttttatttgcgggtctaatctaatattagaatatattaaccgcttaaggcattgaagccatatgggatggggaatgcatttcttcagtgtttctccgagagacttt

SEQ ID NO: 8052 - DNA, 317 bp, Homo sapiens
ctgtgttggactcagggttcagagctgccagcttggggtacctgggagggcacagcactgcctccagaaattcctcaatcttgttggtgtctgtgtgcacttcagtgccatacagcaggaatgggagctgcccccctgggcacagcttctgcactgtctcggtccgccttttggtgtcaacggtggtaacattgaaggtgactcccttgagccacagtaccatgaacagtctctgggagaatgggcagttcccaatcttggccccatcactgccagccttcacgaacaattcgacctgcggttgttcttcagccatg

SEQ ID NO: 8053 - DNA, 386 bp, Homo sapiens
  unsure (11): n=A,T,C or G
  unsure (371): n=A,T,C or G
cgagcggccgnccggcaggtccaagatggttggggcataccttggttttatacattttagggagacataagacattaatcaatatatgtaagaagaacattggttcagtggggagggagcttccaggtcacagataggtgagacacaaacagttgcattcttttgagtttctgattagcctttccaaaggaggcaatcagatatgtatctatctcagtgagcagagagataactttgaatagagtgggaggtgggtttgccctaagaagtttccctaagcttgagttttccttagtgattctggggccccaagatattttcctgtcacagttgacatccccaacacagtgtttagggctcagaaaaagatncccctaaaatagggt

SEQ ID NO: 8054 - DNA, 414 bp, Homo sapiens
  unsure (13): n=A,T,C or G
  unsure (14): n=A,T,C or G
  unsure (195): n=A,T,C or G
  unsure (201): n=A,T,C or G
  unsure (211): n=A,T,C or G
  unsure (340): n=A,T,C or G
  unsure (355): n=A,T,C or G
  unsure (395): n=A,T,C or G
ggatctgggagtnncttcctaacggaaatggaacaggattaccaactagtagacgaaagtgatgctttccatgacaaccttaggtctcttgacaggaatctgccctcagacagccaggacttgggtcaacatggattagaagaggattttatgttataaaagaggattttcccaccttgacaccaggcaatgtanttagcntattttatgnaccatggttatatgattaatcttgggacaaagaattttatagaaatttttaaacatctgaaaaagaagcttaagttttatcatccttttttttctcatgaattcttaaaggattatgctttaatgctgntatctatcttattgntcttgaaaatacctgcattttttggtatcatgttcaaccnacatcattatgaaattaat

SEQ ID NO: 8055 - DNA, 367 bp, Homo sapiens
  unsure (331): n=A,T,C or G
  unsure (361): n=A,T,C or G
ccaaatgggagagtggttacaacacacgagctacaaactacaatgctggagacagaagcactgattatgggatatttcagatcaatagccgctactggtgtaatgatggcaaaaccccaggagcagttaatgcctgtcatttatcctgcagtgctttgctgcaagataacatcgctgatgctgtagcttgtgcaaagagggttgtccgtgatccacaaggcattagagcatgggtggcatggagaaatcgttgtcaaaacagagatgtccgtcagtatgttcaaggttgtggagtgtaactccagaattttccttcttcagctcattttgnctctctcacattaagggagtaggaattaantgaaag

SEQ ID NO: 8056 - DNA, 513 bp, Homo sapiens
ccaagggaaactgtctggattggattgtcgaggttttcgcttttgtaaagcttgacccataatgtaggaaggtattcagaggaagtgatcacatttccacttaaatcaaattgattaatctgccggaaaactatgatgtttacatcatcgatgtcattattcccaacctcaatcaccctatggtgggggagcgcccgctcaatgtggtcgttgccttctgccttgagctgaacgtggtacacacatcccggcagcaatccacgtaatctgaacttgccctcttcgtctgtcacggtgtcttctccgtaaatgctgcagtcgttctggcccaccgcttccatggcaaccccttgttcgggctctccgtttaaggaagacactgtgccatagcaactgtaagcggttcggtaccccgtgatggtgatcttcaggttctggccttcctgcacctcgatcatctgtgaggatggctcaaaccggaactccttcatcatgggtttgaagtaatactgg

SEQ ID NO: 8057 - DNA, 452 bp, Homo sapiens
  unsure (16): n=A,T,C or G
  unsure (26): n=A,T,C or G
  unsure (28): n=A,T,C or G
  unsure (61): n=A,T,C or G
  unsure (97): n=A,T,C or G
  unsure (122): n=A,T,C or G
  unsure (160): n=A,T,C or G
  unsure (175): n=A,T,C or G
  unsure (364): n=A,T,C or G
  unsure (366): n=A,T,C or G
ctggtgaactgaatgngagtcacctntnttccagttgctttttcttttttatttacaatgntcaatttctgaatgatgtaatctggacatcttttgngctggttgatctttacaacaacatntccaaaagcccgagtgccctcttccattgacggccagnattctgcacacttgntcctgtttccttcttcacatcgagtgaccatgacaataactgtggctttctgttcccaaatcatcctccagaaatcatcaacagtttcatccctgggaccttgtgcagcaatgtatttcctgggttctttgaaaccatcaatatagctggcatttatgtagtttgaccctgcatctccgtttatctcananagttcaacacggttataatcataaggaagaatgtcaacataacggtttttattctggttaaagggctttcgagcttcctttatagg

SEQ ID NO: 8058 - DNA, 190 bp, Homo sapiens
  unsure (8): n=A,T,C or G
  unsure (11): n=A,T,C or G
  unsure (18): n=A,T,C or G
  unsure (19): n=A,T,C or G
ctgggacnacnggcaccnnccaccatgcctggctaaatttttgtatttttagtagagacagggtttcactgtgttaaccaggatagtctcaatctcctgacctcatgatccgcctgctttggcctcccaaagtgctgcaattacaggcgtgagccactgcgcccagcccaaagtggttaatattaatatg

SEQ ID NO: 8059 - DNA, 328 bp, Homo sapiens
ccaggaagccggccagttgagttagaaaacatctctctttgaggtttacgaactgctgtttgttctctgccaactgggggcgcaatttctcgttgatttctagaatgttcatctctgccttctcgttggaccaagggccggctgataccaccatgctgacgtttgtggcagaagaggtggagtcagggacttactgttgtgaaaaatgtgatcactcccacagcactttaggatccttcaccacaaaaacaaggttcgaggtgcctcaactcagagctgaaagcactgccagtagctcagactctgataagagtgaggtagattgtgg

SEQ ID NO: 8060 - DNA, 294 bp, Homo sapiens
ctgggcggatagcaccggacatattttggaatggatgaggtctggcaccctgagcagtccagcgaggacttggtcttagttgagcaatttggctaggaggatagtatgcagcacggttctgagtctgtgggatagctgccatgaagtaacctgaaggaggtgctggctggtaggggttgattacagggttgggaacagctcgtacacttgccattctctgcatatactggttagtgaggtgagcctggcgctcttctttgcgctgagctaaagctacatacaatggctttgtgg

SEQ ID NO: 8061 - DNA, 549 bp, Homo sapiens
ctgccaaaatgtctacaggtccaactgctgccactggcagtaatcgaagacttcagcagacacaaaatcaagtagatgaggtggtggacataatgcgagttaacgtggacaaggttctggaaagagaccagaagctctctgagttagacgaccgtgcagacgcactgcaggcaggcgcttctcaatttgaaacgagcgcagccaagttgaagaggaaatattggtggaagaattgcaagatgtgggcaatcgggattactgttctggttatcttcatcatcatcatcatcgtgtgggttgtctcttcatgaagaaccagcggaactcaaaactgctgttcaagaaacctcttcaagacttttgacttagaacctgctatattatcaagcttacctactgttatctctaaaattttttttgtgttaatgtaaagttgaatttctaggaaacgtgcctttgttttttaatatgcactccaaattagaaggccggccccgtccacattttgcacagtgcctttacagatttacgtatgggctgatgaagagg

SEQ ID NO: 8062 - DNA, 515 bp, Homo sapiens
aagtcaaagcaggagagtaattatgaatagcgcagcgggattctcacacctagaccgtcgcgagcgggttctcaagttaggggagagtttcgagaagcagccgcgctgcgccttccacactgtgcgctatgacttcaaacctgcttctattgacacttcttctgaaggataccttgaggttggcgaaggtgaacaggtgaccataactctgccaaatatagaaggttcaactccaccagtaactgttttcaaaggttcaaaaaaaccttacttaaaagaatgcattttgattattaaccatgatactggagaatgtcggctagaaaaactcagcagcaacatcactgtaaaaaaaacaagagttgaaggaagcagtaaaattcagtatcgtaaagaacaacagcaacaacaaatgtggaattcagccaggactcccaatcttgtaaaacattctccatctgaagataagatgtccccagcatctccaatagatgatatcgaaagagaactgaagg

SEQ ID NO: 8063 - DNA, 457 bp, Homo sapiens
  unsure (437): n=A,T,C or G
cctttgaaaggtaagttctggcaggaggaacagtgtatctgtggcaactttgtttttccttattccattttatgaagactcagttctaaatgtcagccatgttaggaacttcataaatggagctatttttggtcattactatggaaggacctcttttctaagaagccataaagaaaagttgcaagttagtcacagaagttttggattgcctgtagatttctttatgataggaaattagtgagttaatattctgtttattttctgacacagatttttctttgataaataaaagactcttattcattaagatcagcttcttgttctgtttttcttggagtaaataactgtgaatttgggtagattgattttactttgttcagtttcctctgtaaaatgaggattttgaactgtatagtcaaatatactctattcattgntgaagtaagaaatcttatgc

SEQ ID NO: 8064 - DNA, 193 bp, Homo sapiens
  unsure (185): n=A,T,C or G
  unsure (191): n=A,T,C or G
tcatcaatggagaaacagagtctgagtggggttaaagaacgggcttcccaatgtcacacagtggtgctagaatttgaagcaaagtacgtcagattctaaagccacaatctttctacactttcaccccaaaatgaggagtaagaatgaaagtgacactgtggatttaaggaagataatagaaagtntattanaa

SEQ ID NO: 8065 - DNA, 447 bp, Homo sapiens
ctgttggagacccctgaatcttgggctaaagagactttccttacccagaagctccgtgtacctgccaaatggatccacgaggccaaagctgtgcgagcacacatggaatctgacaagcacttagaggccctttgcttatttaaggctgagcactggaaccgctgccacaagctcatcatccgacacttagcttctgatgccatcattaatgagaactatgactacctgaaggggttcttggaagacctggcacctccagagcgcagcagcctaattcaggattgggaaacatctgggcttgtttacctggactatattagagtcattgaaatgctccgccatatacagcaggtggattgctcaggtaatgacctggagcagttacacatcaaagtgacttcactgtgcagtcggatagagcagattcagtgttacagtgctaaagat

SEQ ID NO: 8066 - DNA, 145 bp, Homo sapiens
gtggcttctggactgcgcgatgactggacgcaagtaacttctaggtctgcagacaagaggaagagaagatgaaggaagactgtctgccgagttctcacgtgcccatcagtgacagcaagtccattcagaagtcggagctcttagg

SEQ ID NO: 8067 - DNA, 436 bp, Homo sapiens
  unsure (11): n=A,T,C or G
  unsure (16): n=A,T,C or G
  unsure (184): n=A,T,C or G
  unsure (188): n=A,T,C or G
  unsure (213): n=A,T,C or G
  unsure (298): n=A,T,C or G
  unsure (346): n=A,T,C or G
ctggctaaagntcaanaaaatactattgcttctttaagaaatgctgctagtcatggtgcagcctttgtagaatttgacgtacacctttcaaaggactttgtgcccgtggtatatcatgatcttacctgttgtttgactatgaaaaagaaatttgatgctgatacagttgaattatttgaaattncagnaaaagaattaacatttgaccaactncagttgttaaagctcactcatgtgactgcactgaaatctaaggatcgaaaagaatctgtggttcaggaggaaaattccttttcanaaaatcagccatttccttctcttaagatggttttagagtctttgccanaagatgtagggtttaacattgaaataaaatggatctgccagcaaagggatggaatgtggggatggtaacttatcaacatattttgacatg

SEQ ID NO: 8068 - DNA, 454 bp, Homo sapiens
ccaacacccacttctctggttgtataagacagggacctaaaaagggaaaggatgggaggaggatcatcctgcagtgatcatgtagggcttcatgctataaatggttttgcatttccggagatgaaacaagtctcttcaccacagaactactgcagatcatagccctatggtctggctggttttgtcaatctggcagttcagggtcagtgcaaaggacatccccaacacctcaatcacacatacacagatggtgatgattccgatatacaggaaattggaatgaagccacagtcttgctttcgcatagcaaccctccacttttcgatctgaggggcaagatgctggtgggccactggtccaatcactcgtgccatttataccacaacactgcagaaatgactggatggagtcccacgctgccttggtgctattgtctgagtggtaacggtggatg

SEQ ID NO: 8069 - DNA, 449 bp, Homo sapiens
ctggagagtgtagatcccaaaaattacccaaagaagaagatggaaaagcgatttgtcttcaacaagatagaaatcaataacaagctggaatttgagtctgcccagttccccaactagtacatcagcacctctcaagcagaaaacatgcccgtcttcctgggagggaccaaaggcggccaggatataactgacttcaccatgcaatttgtgtcttcctaaagagagctgtacccagagagtcctgtgctgaatgtggactcaatccctagggctggcagaaagggaacagaaaggtttttgagtacggctatagcctggactttcctgttgtctacaccaatgcccaactgcctgccttagggtagtgctaagaggatctcctgtccatcagccaggacagtcagctctctcctttcagggccaatccccagcccttttgttgagccagg

SEQ ID NO: 8070 - DNA, 513 bp, Homo sapiens
  unsure (354): n=A,T,C or G
gtgttagtggttacccagttagctctcaagttatcagggtattccagagtggggatatgatttaaatcagccgtgtaaccatggacccaaaatttaccagaccacaaaacttttctaatactctaccctcttagaaaaaccaccaccatcaccagacaggtgcgaaaggatgaaagtgaccatgttttgtttacggttttccaggtttaagctgttactgtcttcagtaagccgtgattttcattgctgggcttgtctgtagattttagaccctattgctgcttgaggcaactcatcttaggttggcaaaaaggcaggatggccgggcgcggtggctcacgcctgtaatcctancactttgggaggccaaggtgggaggattgcttgagctcaggagtttgagaccaacctgggtaacatagtgagacaccatctctattatgaacaataacagttaagaaaaaaaaaggcaggcaggcggttatggtggttccctcccatcccaccacataa

SEQ ID NO: 8071 - DNA, 447 bp, Homo sapiens
ccagcagaacacagagtggattttggtcccgtttgttccccagtggggtatctatccttgtgcagggcacaagcctacatggtggctctggtcatatcattagaaaatagacagaaatgggctgcacaccagaatgaatgaattgaattgaaagggaggagtgatggtggaaaaaaaaaacaagtcaattcatttagactggtagaaccagaaccactgtgtagtacatccaaacggttaaaattccctggaagatgttacataatcctatcatggtgtttatttatggaaatctattttaaaaattttatgtaatactgcacagtctgtttgcatgatgtcttgtacgtagtagcaactcagtaaatactttttgaatgaactagtatagtattttaattagctagtcttcatgtactggtacaaaagaacagtgtcatcttacag

SEQ ID NO: 8072 - DNA, 442 bp, Homo sapiens
ccaatgtctgttaaccattaactctcttcatgattgcaccagttagaccatttgccctgatggggggaaaaagaagaagaaaaaacaaaatagaagaaaaaaagtgacaagagaaagcaagctgctaatggccgatcccaacacactttctgggagacagtagatgaaatcacagcacagtgaacacatgctgcctaaaatcagccttgttggggagtaatcccaactgccacccccaagacacagggtccagtccacttatctatagtctgagatgttcaccaacaaaaatggattaaagaatcttggacacaaagggccagaagaaaaagcctgagatgatcggttctgtgatttgttgcagagtgataaagagtaaatggtgagtaagtgttgtgtccaaaggtggagactccatagtcggcagacaggagagggatgg

SEQ ID NO: 8073 - DNA, 595 bp, Homo sapiens
  unsure (461): n=A,T,C or G
cctcctcgaccaaggcagggaacttcaatctgtataagtatctgcagttgctggaataatttgaagaccccatggagctaaggagattaagtggaggattttcattgtttcagaggggcaaggggcaaatccattgctaattctttaatgatgaaaaatggtaagaagttgttaaactcctttggggattttaaaaagtgatacgtaaacagaagagagagagagagagagaaatcacagtagtgaggctaacaaaaataatgataaaaaggttagaagaacccaggatacttagtggatgcctagacaacataaaaatagatttatagaaggaagcaatggaatttgaatataaaagggtatcagaaagttaatgtgttgcatctgaaattcaaagtatttccttttggctacacaagaaagacttttaataaaaccctttgtatatatttctgaaaggnaaatattttatagggaaatggaggattggaagaaaatctgttccatcatgtctgggtattagaattttgcttaataacttgccaaaatattacgcttccaagggctatggcattatgtgtgtacccaattaaag

SEQ ID NO: 8074 - DNA, 231 bp, Homo sapiens
gaaaaacaagatggagatccagggcaaccccaaataccgcgccctctctgagcaaggcgtctgcaccctagagatccggaaaccctgcccctttgattctggggtctacacctgcaaggccataaatgtgctgggggaggcatctgtggactgccggctggaggtcaaagcctcagccgcacactgaagagtcacgggaggaggctgtgatgaggagccaggtgctgcagg

SEQ ID NO: 8075 - DNA, 291 bp, Homo sapiens
cctgttctggaaatggcaggtcacagcagcgggcagtcatgttgtggatcagcccaggaatatgtttatgcttggtgagaactctttggtttccacagaggtggcccatgaggttgggggtgactcgaccgatgtcaatggtcaagatgtcccggtcatagttggggtaaggagcccgacgggcaaagcactcatcccgagtagggctgggagggtggcggcaacacaagtggtggtgggtcttcacagcatactcccggtcacagtatttgtcaagggtatcctcccagg

SEQ ID NO: 8076 - DNA, 504 bp, Homo sapiens
  unsure (496): n=A,T,C or G
ccacatcttcgaacaccgggtcaccagtgaggctgctcagggtggcaaattcaacaatgaaggtcccaatccctgccgtacaggtgacaggggtctctcctgggttcacgccatgaagtaagttcactgttccatatggcatgccagtgggggtctgaaaggctgggaggagttttcgggccgcctcctcagccattctcaggagaggcccggaacagggccatccagcctctacttccaccccagccttcttggagagcagatgagcagacaggagtcctcctaccactcgaatgtttgtttcaaacacagaggcgttcacatcaatatcaaagtccacgctgtcctggagcacttcaaccactctttggaattctgagacattccccaaaatcagcaaggtgtccagtgcatcaattagagtcagagaaaaactgccccaggtgtcgtgcccgtcacaggtgagaggtcgcagctcatcgaagggaaaggcatnctccaggt

SEQ ID NO: 8077 - DNA, 427 bp, Homo sapiens
  unsure (306): n=A,T,C or G
  unsure (353): n=A,T,C or G
  unsure (387): n=A,T,C or G
  unsure (407): n=A,T,C or G
  unsure (415): n=A,T,C or G
  unsure (421): n=A,T,C or G
ccagggggaattgagggaggctctaagctaggggcactgcatggtgggacaggatggccccttgaggactgaaccctggggagaagacaaacagtaataataaaaacaaataacaagtactttaagaatggattgtatgacctatagtgacagatgacatcactaatactgaaagcttcttatattaataattttggcaaaatgtcattttgtaatatagtatatgctttccaggtgtgggggtggtaaagtaatgaggccaaaatcatcctgccccaagactaatatcttctaatggtgcattancaaggaaggcagaaatcaatatttagatatcagtagagtacataatnctgtagaaagaagaagagcacacatgagacaganaaggaggtggatgctcctgngttgagancaaggngtgggg

SEQ ID NO: 8078 - DNA, 370 bp, Homo sapiens
ctggcagaccccccaaccacatcagaggagttttcatttcttcctgggctgcttatctgggaagccttcaaagaattcgttacacatcatggcgatgcaggacaggaagacacagtactcttggaagtccacctcgttgtccctgttgctgtccaagttgctcatcagcttctggaaagcagcttcatctgtccttttccccaagaagctgggcagctcccgggtcagcagctcctttagttctgacttgttgagcttgaacttgtcaccctctttgcccgagtacttgtggaaggtggacaccatcacatccagggccttctccagagggcacgccatgacagcagtcaggatcaaaccaagaaagaag

SEQ ID NO: 8079 - DNA, 582 bp, Homo sapiens
tagtaaaataattttatttagtttcttattttaaaaaaggtagcatttcaacatataaatttagactcaagattacagtgtatatttgccaaaaggaacaccccgaaagacggccagcctcagagctgagagggcacagggaggcacactcctcacacatggagtttaagcagaagtgctttaagacttcacagcggcatttccctgttcctcagccccgcctccagggccatcactttggggcaacagcttttgctcatgtaactataaaacatctctaggaatgaaagcacagaggtcaatgatccagattttccacaacaatcatctgcagcaacaattcgacaggtaaagattttatttttataattcaaaagttcttttaaggagaactaaagaacacaaaattcatttataaagagaatttatagaattaaatgagcaaaaatgaaaaattattttctccatattacaaatgcctctataggataaggcccaggggaaagacccattcaaatctgggctttcctttcccaaataaagtgtttggcacaaccaacaaactgtcatgagactgacagg

SEQ ID NO: 8080 - DNA, 604 bp, Homo sapiens
ctgcaccattttgcattctcgctagcaatgtgcaaggattacagttttttcacatcctcgccaacacttgtcttttgtctcttcaacaaatggtgttgggaaaacaatacccacattcgaaagaatgaaattggacccttatcttatgtcatacacaaaaatgaactcaaaatggatcaatgacttaaatgtatgacccaaaactgtaaaactcctaagaaaaaaaaacaggagaaaagctctatgacgttgatcttggcagtgacttcatggatatgacaccaaaagcacaggcaacagaaacaaaaataagtaagtgggactacatcaaactaaaaagcttctgcacagcaaagaaaacaatcaacagagtgaaaaaaacaacctacaaaatgtaagaaaatatttgcaagtcatatgtctgaaaagtagttaatatccaaaatatataaggaactcctacaacacaatggtaaaaataaatgaacaatttgattacaaaatgggccaaggacttgaatagacatttctccaaagaagacataagaatgccaacagctatatgaaaaaatgcttggccgggcccagtggctcacccctgtaa

SEQ ID NO: 8081 - DNA, 151 bp, Homo sapiens
ctgcaagaggaggcccacctcaacacctcctttaagcactttattttctttgttcaggagtttaatctgattgataggcgtgagctggcacctcttcaagaattaatagagaaacttggatcaaaagacagataaatgtttcttctagaac

SEQ ID NO: 8082 - DNA, 482 bp, Homo sapiens
  unsure (39): n=A,T,C or G
  unsure (479): n=A,T,C or G
ctgtggcgagtccgtcctttctttattctggcaggcttnggtttggggatgtactgattatttgcctggtactcgagttctttacggaagtagtgaattgctttgtttaaaccttcctccagcgggaccacgggctcccaccccagcatcagctttgcttttttgatgtctggttttcttttctgtgggtcatcctgggcttcggagagaaactgaatttcacttccgctaccaacaaggtttttaattaactgagcaaattctaggattgtgtgttcttctgggttccccaggttgaccgggctgctgacgttgctgttcatgagagccacgaggccattcactagatcgctgacgtactggaacgcccttgtctgagacccggatccgtataccgtgagtggctccccctggagcgcctgcaggatgaagttgctgactactcgcccatcgttcatgtgcatgcgtggcccaaaggngtt

SEQ ID NO: 8083 - DNA, 558 bp, Homo sapiens
ttctgctctgtgagttaccacacccaggattcctcctgatcccagagaaatcggatctgcgaacagtggcaccagcctctagtctcaatgtgaggtttgactccaggacgatgaatttaagctgggactgccaagaaaacacaaccttcagcaagtgtttcttaactgacaagaagaacagagtcgtggaacccaggctcagtaacaacgaatgttcgtgcacatttcgtgaaatttgtctgcatgaaggagtcacatttgaggttcacgtgaatactagtcaaagaggatttcaacagaaactgctttatccaaattcaggaagggagggtaccgctgctcagaatttctcctgtttcatctacaatgcggatttaatgaactgtacctgggcgaggggtccgacggccccccgtgacgtccagtattttttgtacatacgaaactcaaagagaaggagggagatccggtgtccttattacatacaagactcaggaacccatgtgggatgtcacctggataacctgtcaggattaacgtctcgcaattactttctgg

SEQ ID NO: 8084 - DNA, 373 bp, Homo sapiens
cctgagctcatcctgagctagtgatgccagtgtccagagcacatggagtgaccctctgagtgccgagtgcttaggcagagctgccgtgctctgaacttgagctctggtggggctcccagctccatcatgcatggtgactaggggaaagatggggctggcccaggactcatgctgaaagagaaattcaatctaacaaggcccatattaattatattaacccgggaaatatgatgatgagcaagaaaggagcttatgattcattttatgagaaggataagctcccaagtcattacagcataggaagaactctagagccacaagagatgcttcctgatgtcagggggttggtgaggagaatatcatgccaagctgg

SEQ ID NO: 8085 - DNA, 610 bp, Homo sapiens
ctgggaagccacgagaatattgtgaacctgctgggggcgtgcacactgtcaggaccaatttacttgatttttgaatactgttgctatggtgatcttctcaactatctaagaagtaaaagagaaaaatttcacaggacttggacagagattttcaaggaacacaatttcagtttttaccccactttccaatcacatccaaattccagcatgcctggttcaagagaagttcagatacacccggactcggatcaaatctcagggcttcatgggaattcatttcactctgaagatgaaattgaatatgaaaaccaaaaaaggctggaagaagaggaggacttgaatgtgcttacatttgaagatcttctttgctttgcatatcaagttgccaaaggaatggaatttctggaatttaagtcgtgtgttcacagagacctggccgccaggaacgtgcttgtcacccacgggaaagtggtgaagatatgtgactttggattggctcgatatatcatgagtgattccaactatgttgtcaggggcaatgcccgtctgcctgtaaaatggatggcccccgaaagcctgtttgaaggcatctacaccattaagagtgatg

SEQ ID NO: 8086 - DNA, 468 bp, Homo sapiens
ctgcagtggaggcggcggtgggaaagcctggcccacacacgtggtctgtagcgacagcggcttggaagtgctctaccagagttgcgatccattacaagattttggcttttctgttgaaaagtgttccaagcaattaaaatcaaatatcaacattagatttggaattattctgagagaggacatcaaagagctttttcttgacctagctctcatgtctcaaggctcatctgttttgaatttctcctatcccatctgtgaggcggctctgcccaagttttctttctgtggaagaaggaaaagagagcagatttactatgctgggcctgtcaataatcctgaatttactattcctcagggagaataccaggttttgctggaactgtacactgaaaaacggtccaccgtggcctgtgccaatgctactatcatgtgctcctgactgtggcctgtagcaaaaatcacagccag

SEQ ID NO: 8087 - DNA, 387 bp, Homo sapiens
ccaggttgggatgcagagaaaaacaggcaggagggtgtcaatctatagcatcctgaaccccaaaaggtctgtaactggattctctaagccttgagaagttcagaccaaagcttcagaccagggaaaatattttggaaagatcagtctttccaagattgagctcctttccaagaagctggacaggaaacccaataaatgtggatctgaaaaaacaaaatccaagagagaagcaaaatgggctgggggtgtgcaataagagaagcaaggaaaatggaaagactgtagctgaggatcttttattaaaaaaaaatggatgggactttggtgatgagagagaaaaagggcaaaagtctgcagttaggaatttaggtgaccgaagactgtcct

SEQ ID NO: 8088 - DNA, 386 bp, Homo sapiens
ccaggctgaggttccagatctgttgccatcatggccccttcagggtcctgggaaattcctggcttctcctaaatcagggtgaactgggcctccaggatcaggtctggagcaggcccaaatatagtcctggatctgcctggattaggtgccaatgtctgagtctgggttccagatcaactccagaccccaggctggatctggccccatttgagttctgattccccttggagctgggctctgggccctgggccagcatctatccttgtgtggcatctgtcctgagctggtcctggggcaccatgcatagttagtgttctttgttggcccaccagggtggggctgtccagagctgccaggtcttaactccccaagttccaggttcttag

SEQ ID NO: 8089 - DNA, 560 bp, Homo sapiens
tcgagcggccgcccgacaggtccacactctacttctgcttctgccacctatggggtcgaggcaggtgtggtgccttggctaagtccacagacttctgagaggcccacgctttcttcttctccagaaataaaccctgaaactcaagcagctttaatcagagggcaggattccacgatagcagcatcagaacagcaagtggcagcgagaattcttgattccaatgatcaggcaacagtaaaccctgtggaatttaatactgaggttgcaacaccaccattttcccttctggagacttctaatgaaacagatttcctgattggcattaatgaagagtcagtggaaggcacggcaatctatttaccaggacctgatcgctgcaaaatgaacccgtgccttaacggaggcacctgttatcctactgaaacttcctacgtatgcacctgtgtgccaggatacagcggagaccagtgtgaacttgattttgatgaatgtcactctaatccctgtcgtaatggagccacttgtgttgatggttttaacacattcaggtgcctctgcct

SEQ ID NO: 8090 - DNA, 337 bp, Homo sapiens; identical to SEQ ID NO: 7576

SEQ ID NO: 8091 - DNA, 604 bp, Homo sapiens
cctacaccccagcaaccatgtccaagggacctgcagttggtattgatcttggcaccacctactcttgtgtgggtgttttccagcacggaaaagtcgagataattgccaatgatcagggaaaccgaaccactccaagctatgtcgcctttacggacactgaacggttgatcggtgatgccgcaaagaatcaagttgcaatgaaccccaccaacacagtttttgatgccaaacgtctgattggacgcagatttgatgatgctgttgtccagtctgatatgaaacattggccctttatggtggtgaatgatgctggcaggcccaaggtccaagtagaatacaagggagagaccaaaagcttctatccagaggaggtgtcttctatggttctgacaaagatgaaggaaattgcagaagcctaccttgggaagactgttaccaatgctgtggtcacagtgccagcttactttaatgactctcagcgtcaggctaccaaagatgctggaactattgctggtctcaatgtacttagaattattaatgagccaactgctgctgctattgcttacggcttagacaaaaaggttggagcagaaagaaacgtgct

SEQ ID NO: 8092 - DNA, 555 bp, Homo sapiens
cttcatcctaattgaggtgatacaaaatataagaatattccttcatcctggggcatcatgtggtcatctgagagctcatttgattacattaaaaatcgtgttccttagagagagagtgccagtatttagactttttgagtgtgaatcaggagggaaacacacatccattgacaagaagatggatataattatttttaaaaagagtgatttgatcctttggaggaaaataaattctggtggaccttctaagtaactgctagaatgattgggtaatgtatacagcttttgcttctccataaataatgtaagtattaaaaaggagattttaaactagaaggaaggaatctctggagtgagaggaaaagtttaattgtatttcagtatctatgtctatgaaaagttgatatacggtgtcactgtggtatacccaaacttgtttatacacatgtataaccagtacacagtaagtaccatgagtggcttttagtgattttatctttttaccttgtagtacagtctccctggtgtctcacaaggctagtttacttactttgg

SEQ ID NO: 8093 - DNA, 564 bp, Homo sapiens
  unsure (550): n=A,T,C or G
ccaatatgcctttggagcacagcctatggtttatgtttcttttatgaccacctttaatatctgtcaaacgactagacatgctatagctttacccgaaggtaatttgattgactgtgctctgctagaagatggtgtatgggtctctctcgaggtaactgccaataaatgataagtggtatttgttttagataatgcctctacctcagtggtagctttgataatggcaaattgtaattgcaagtgccattttcagaataggcattggtttattttaggaagaggataataaagttccttttagttatcaaagtaacaccttttattgttaaatctcaacttttgaagaaaacactttcaatttcttaactttttcctcagggttagtgagttagtacaactacccaaagaagtgttaaaatattgagattctatatgtgtgtgtttatatgtgcatctatgtattacgtatacaaaatatttcacctcaaaggactttttgaaaaggtaatctttggtctatagtacagtgttaagctcactgataatttanaatcattaagttcg

SEQ ID NO: 8094 - DNA, 556 bp, Homo sapiens
cctttgaggattggaataagacagagctagactcattcctgattgaaatcacagccaatattctcaagttccaagacaccgatggcaaacacctgctgccaaagatcagggacagcgtggggcagaagggcacagggaagtggaccgccatctccgccctggaatacggcgtacccgtcaccctcattggagaagctgtctttgctcggtgcttatcatctctgaaggatgagagaattcaagctagcaaaaagctgaagggtccccagaagttccagtttgatggtgataagaaatcattcctggaggacattcggaaggcactctacgcttccaagatcatctcttacgctcaaggctttatgctgctaaggcaggcagccaccgagtttggctggactctcaattatggtggcatcgccctgatgtggagagggggctgcatcattagaagtgtattcctaggaaagataaaggatgcatttgatcgaaacccggaacttcagaacctcctactggacgacttctttaagtcagacctcggcccgaccacgct

SEQ ID NO: 8095 - DNA, 212 bp, Homo sapiens
cctggctcctctttcatccttggtaaagagctctggggggtttccccagaggagcctgtccctctgccccaaatcctatcatgctcccttatgaccttctttccagaccccctgagtgccgatcccacctgtgaaaggggaggagcagatctggggaagggatatgcccagaggaaatcaacaagaccaaagagacgtcagagtcctgatgg

SEQ ID NO: 8096 - DNA, 566 bp, Homo sapiens
ccactgtgaaaaaacaaccccctcaaaacttcaggagaatgtatataataaatgaaggtacaatttcataccttcacaggattattgagaaggtcaaattacataacagatatgaaagcactgtgtaaactatgcggactatgctgcaccaaataactgtaaagaattattaactagactgtaaatgccttgagggcaaggaatgcatctgcaacgggtatttgtgaagtacttgacagtttgctaaggacttctgtggattttcctcatatgctactcataacaaccctggaaggtaaggggaattgttatcccaaattccaaataaagacactgcaggtcagacatcacacaggtggtaaatagcaattctggtacttactttagatattctgctacaggcttgctattcaaagtgtggtatgtagaccagcaacattgactctctgtgctatctttcttttttataaactcggaattatttcaaaataagaagtttctaacaaaagagattcagaagagtcaaacccttgggtgtgaaaaagttttaggaagactttcctgaa

SEQ ID NO: 8097 - DNA, 136 bp, Homo sapiens
  unsure (21): n=A,T,C or G
  unsure (51): n=A,T,C or G
  unsure (71): n=A,T,C or G
  unsure (77): n=A,T,C or G
  unsure (103): n=A,T,C or G
  unsure (113): n=A,T,C or G
  unsure (132): n=A,T,C or G
ccccccccttttttttttttnttttttttttttttcgcattcaacttaaangcttttattgacaatgtctnggaacnataagcaaacaatgcttaaatttttnattcaaattnactttccacatgtcaaaanacct

SEQ ID NO: 8098 - DNA, 431 bp, Homo sapiens
ccacttcacatgatggcgggcctttaagagcacaaagaagtttaatatggacaacaacaggaaaaagcaagaagaaaacaagtagggaaaaacagctaacctggagagaaagaatttctttaacctttatgttcttcattaaaaatcttatcttggactgatttgagggatttttagaaacatggccttattttatataagcattaccttcccaggaatctttgttgtatattaatttttgataaccatttgattaactttaaaattaagtatatgtgtgtatatatacatatgtatgtttatatacacacatgtatctgtatagttttatatatacatatatacacatagacatacagagaaccactactttgtaatagtgtacagtttgttttatatctctttactttttttgttactattttatctgg

SEQ ID NO: 8099 - DNA, 590 bp, Homo sapiens
gagctagactaagttggtcatgatgcagaagctactcaaatgcagtcggcttgtcctggctcttgccctcatcctggttctggaatcctcagttcaaggttatcctacgcagagagccaggtaccaatgggtgcgctgcaatccagacagtaattctgcaaactgccttgaagaaaaaggaccaatgttcgaactacttccaggtgaatccaacaagatcccccgtctgaggactgacctttttccaaagacgagaatccaggacttgaatcgtatcttcccactttctgaggactactctggatcaggcttcggctccggctccggctctggatcaggatctgggagtggcttcctaacggaaatggaacaggattaccaactagtagacgaaagtgatgctttccatgacaaccttaggtctcttgacaggaatctgccctcagacagccaggacttgggtcaacatggattagaagaggattttatgttataaaagaggattttcccaccttgacaccaggcaatgtagttagcatattttatgtaccatggttatatgattaatcttgggacaaagaattttatag

SEQ ID NO: 8100 - DNA, 601 bp, Homo sapiens
ccatcggtgctgaaattgagcattttaaatagtacagtaggctggtatacattaggaaatggactgcactggaggcaaatagaaaactaaagaaattagataggctggaaatgcttactttctgctctcattttctttcattttgtctgctgtctttttgaatgccaatactttcatttaaaatgttttgggagcacggcaacccaaaatgactgaacggtggtccaaaaatccaaaccaactgataattacttctcgaggtgataggaaaggcacaggaagttaggactttggctgaaatgatgaaaacacatgttcgccattttagggatcagcgcctcgactcctgccacctccggctccaacgatgatcatgtttggatgtatttattgaattgtcctttgctgatgaggaatttttaaagtatttcatagaataagtcctttggtatgcagatgctacatggaaggaaagaaagaaaaaaagaaaacacacaatattacttgctccataccctaaactgccgataccacagccgtaaaatgaaggtgtctagtagttgttatagcacggtagtccattctttctaaaggaccactt

SEQ ID NO: 8101 - DNA, 594 bp, Homo sapiens
  unsure (511): n=A,T,C or G
  unsure (549): n=A,T,C or G
tctaaataagaaaataaataaataaaattccagctaggtacatattcttcttgggtacaaagctcaagtcaactatcaattacataattgtaatactattacttgaatcagccattaaaaaatgctctgaatttattagtaaagagctatgaagaagagtcatttgtaatatcatacaaaaaaaaacaaacaaacaaacaaaaaaaaacatgcttttaccaacctgggctgagaaaccacagaagaaaccaaaccagaaatgcacaagtgtaaatgcaaaattcttatagaagaaatagcataagaatttgtacattcggaaataagaccaccttccatgaacaaggagaagcctttggagatatctaaactgtgcaaatgaatagtcgctggctaagactgcttgcaatccttcctggccgctgatgccaacaccaatgtgagcacctacaaaggaaagaggaacactgtcactcccaaaacaaagccacgatctcttttggaaacttgncattcctcttttatttacggaaaacttacagccattgnaattataatttttcacatatattatctgatgaaacacttatgata

SEQ ID NO: 8102 - DNA, 428 bp, Homo sapiens
cctcagttttttctctgtgcatcaacagtctacatatcaagtttgatgagtacctctgaaaaaatatcctaacacttgcagcattggagtcatgctagaatcttttctgcaataaagtattttcacttcttttcttcttctcaatcttctcaatcacctgcccctagaatctgagtggtcctaacctagacctcttgctggccgagatttagacaatgtggttgtttttccttatcttgactaatcttcccgaatcttacattgtgccttaatttgcacatctgcacctctaatgtctgcctatattatctccttggctcacaaggaccttgtgggagagctgctcacatctcaacatgtaaataaaatgtgcctttgggtcaacacaggagaggtgattccaacgttaacaagttagtcaaggaaac

SEQ ID NO: 8103 - DNA, 401 bp, Homo sapiens
ctgaattggcaaagtaaggtttactacacaagcccctctttttcttctgatatccccactcaaatggaagcacactccccagcacatggggatcccttattaatctttactaaagaaccgtgaaccagcattttccagttatcaactggatatttaggcatgaatctggacatgtccatctgcttaagaaatctgcttaagaaatctgtaacagctacaggaaaagacacacccagggccagagattctacaaatgccagaagagtggatgtgatagagaattttttctcaagttttgggttagggcaccagttgcaattttaatccaggggaggatctgggctgctgctgtagggggcaagtacaccagggaggtgggtgtggacagaggcactgggcag

SEQ ID NO: 8104 - DNA, 530 bp, Homo sapiens
  unsure (342): n=A,T,C or G
  unsure (440): n=A,T,C or G
  unsure (442): n=A,T,C or G
cctcaggaaatgggtagaaatcacaggacaatctctcttcccaccaaaaaaaagttgcatattttggtaagtgtttgtcctagagggaaaaacaactgaaatttacattagcagtgctgtgcaagattcttacataattcaagacctaaaaccagcctgcagtggaggtttcagtcctctgttcaggtgcttagacagaagccataagctgatgagcatgacagggaaaaggaggcagtgaagacaggtgacaggcacctggcagggaagaaggattcaggaatgccagactccttgaaatcatgtgggttttttttttttttttccttttaaagtcatctntataggaaggtgctgggcagggatcccagagaaagaaagggtccaagactccattaactgccctggatgaagggcactgctacagcagctagtaccananactctcctatctcacggttgaggcagacccaggatagaatagagaataaaaggaatgcttataggaaacaattttgtatggaatgcta

SEQ ID NO: 8105 - DNA, 603 bp, Homo sapiens
cctcagtgtccaccctccacttccaacccaggaccataccaggtgaagtgagatatgaagaagcatatggtctctttgtacatctgcctcagaacttctttccatcttccaaaatggagagaaaacatgcctaaatggtgccagcatactagctggtaatgaccacattagaacagcattgctactttgacttagtgacttacattttgcttcagttcctcaaataagcattgcgtcttctatctctgacttttctgtcttttctcaatttcaatctgtcaaaacactactcgacctataagacctagtatgaatgttattagatattccctaataacctcagccagaagtggctatacattttttaatttctatatcttttgtttatttttttagaacaccgtatcatatgactattgatatatattattttcactatctgacagtggaatcctgagtacagggtaatgtttgatagatctctatataacctcacaatttaaagccatgattgcaataggggctcaataaaagtttattaaattgataaatttactgaattcctaaactattatacaatcagtgtatattttacacagtgaa

SEQ ID NO: 8106 - DNA, 111 bp, Homo sapiens
  unsure (11): n=A,T,C or G
  unsure (20): n=A,T,C or G
  unsure (23): n=A,T,C or G
  unsure (26): n=A,T,C or G
  unsure (50): n=A,T,C or G
  unsure (96): n=A,T,C or G
ttttttttttnttttgggtnccnatnaaattttattaacaaaatatgacngtgggggggccacagtttgccaaactttgccttggaggacatgcanaggcaccctcaaaat

SEQ ID NO: 8107 - DNA, 392 bp, Homo sapiens
ctggcagatgcagaagaagcgatgtatcagaatgtggatggccgtgtttcggaatgtcctcacacctaccaaaacaggcgacctttcagcagagagatggatttggggctactctctccgcaggctcaggtcgaagattcgtagaggaacaatttagttttaaggacttcatccctccacctatccctaacaggctgtagattaccaaaacaagattaatttcatcactaaaagaaaatctattatcaactgctgcttcaccagacttttctctagaagctgtctgcgtttactcttgttttcaaagggacttttgtaaaatcaaatcatcctgtcacaaggcaggaggaactgataatgaactttattggagcattgatctgcatccaagg

SEQ ID NO: 8108 - DNA, 555 bp, Homo sapiens
ctggggcacgccgagggagcagttccttttgcaaagatgagttagtgcggatcagcacattagcaaagcaaaatatttaaacatttttaaaagctgctaatccttccaatttccctcctgattgtagctcaagctgcagcctctaaacctgctaaaaatcaggaagaaacccctcctctggagggcagatggactgaagtggctacagccagtgtgggtacggaaagcctcccgctgaactgtgatcatgtgacacctgcagaccctgggaagggctgatctgaatcctggcagcaaactcaacctcttcttttgcttggggggcttgtgtttaatacaggtcattgcgatggaagaagtctcagagtctctctcacatcaagaggacagatggggacagggatcctggagcttttcttctcctgtgttctggttgcatacttgaatcccaggaaacagtgtgacacggtgccaatttactgccaaacatgcccggtttgtcaacagagccagacaaggaggagaggagagattcatgccccaaacacaggccag

SEQ ID NO: 8109 - DNA, 608 bp, Homo sapiens
  unsure (453): n=A,T,C or G
  unsure (595): n=A,T,C or G
cctggggctggtactaaaaggaaaaagaggaaagtgaatctgagagaggactgggaatatatttctccctcctcaagcaaacagcaaatcagcatatagttaccaagtgttcacctataatacacagctagaacattactttcagttgccaactggagaatccaggaggccagtggtattggtgaggccacacatacaaaaaagggccacagagaatgtcaagaagatgctgctttccaaagaaatttgagcaaaagctgaaactgaatttaaagtataagaagagctaggctcagaaaaagttgtactgtccccaagtcagcagagaaccaagccctcctaagagtatgttgtctgctacatagacttctgaaataacagtttgctttgtgtatgcctataattgaaactgtaactatttcaggaccaatttacttgatttttgaatactgntgctatggtgatcttctcaactatctaagaagtaaaagagaaaaatttcacaggacttggacagagattttcaaggaacacaatttcagtttttaccccactttccaatcacatccaaattccagcatgcctggttcaaganaagttcagataca

SEQ ID NO: 8110 - DNA, 328 bp, Homo sapiens
ctgtattcagaagagggcaaaggcgtgtttgactgcaggaagaacgtgctgggtcacatgcagcagggtggggcaccctctccatttgatagaaactttggaaccaaaatctctgccagagctatggagtggatcactgcaaaactcaaggaggcccggggcagaggaaaaaaatttaccaccgatgattccatttgtgtgctgggaataagcaaaagaaacgttatttttcaacctgtggcagagctgaagaagcaaacggattttgagcacaggattcccaaagaacagtggtggctcaagctacggcccctcatgaaaatcctgg

SEQ ID NO: 8111 - DNA, 569 bp, Homo sapiens
  unsure (535): n=A,T,C or G
cctcttggctctggagaaggcatccttagcatcctcttctgaagggtgatcataagccccaagttaattaaataggcccaatgtctgcctgctctttctgtattcccttcctgaatctagttcatgtcaacaaatgtgtactattattgtagaaaatcgaatgctctcatacttttaataggtttgcttcttggttaatatgcccaggtcaggaagtggcttatatttcaggagtgctctctaatacttattgcagatattcaagcatttattctctcacacacacgcacttaaaaaccgcacactacctcacactctgcaataatccgatagtatggtggtcatcatacccacatatatacatgataagatagaatgcattgcttaaatagcacataagtcatctataatcctccacaccctgtaataccagtagcacaatggttttctatttggaggttgccaggagcactcaaaagtaagcttctggctcctacaacaacacatccaactgccttggggacaacatgattgncatccttctagtacacactcagtccaaggccagg

SEQ ID NO: 8112 - DNA, 348 bp, Homo sapiens
ctgcataccgctgggtacaggagaaagttcctggaataccaccgccctccaggagctttgcatacctgcgggggcccgggggcattccacctcatcgtgcacctgaaggcgggagatgcagtcaacgtcgtggtgactgggggcaagctggctcacacagactttgatgaaatgtactccacatttagtggggttttcttatatcctttcctttcccacctctaaggtggctggggagatgtcaggggaaagatagatagttgtaaaaactctaaagctttaatatattcggtttgtatgtaatggaagcacggggctagagtttccacataggccccaacataaagg

SEQ ID NO: 8113 - DNA, 177 bp, Homo sapiens
ctgctcagcctcctcattcagtgaagtgagggtgagttgtgaggcaggcaggctcctcagaggggagggggaggggaaacgtcagttacttgggctgtgtccttacgccaagactacaaaacatcgtaagcctcactatacaacactgagctatttacaatggaaattctcaatcag

SEQ ID NO: 8114 - DNA, 606 bp, Homo sapiens
ctgctctggagaatctcaataaggctctcctagcagacattgaagcccactatcaggacccttcacttccttaccccaaagaagataacacacttttatatgaaatcacagcctatctggaggcagcgaggagggcaactactttgagatgagtacctattcaacaaacagaactatgatacggattctgtttgcttttgtatcatcagtggcaagaaacgacaccggatactacacttgttcctcttcaaagcatcccagtcaatcagctttggttaccatcgtagaaaagggatttataaatgctaccaattcaagtgaagattatgaaattgaccaatatgaagagttttgtttttctgtcaggtttaaagcctacccacaaatcagatgtacgtggaccttctctcgaaaatcatttccttgtgagcaaaagggtcttgataacggatacagcatatccaagttttgcaatcataagcaccagccaggagaatatatattccatgcagaaaatgatgatgcccaatttaccaaaatgttcacgctgaatataagaaggaaacctcaagtgctcgcagaagcatcggcaagtcaggcgtcctg

SEQ ID NO: 8115 - DNA, 421 bp, Homo sapiens
  unsure (370): n=A,T,C or G
cgcgtgagccactgcgcccggcctagtttgtgctttttacttaccagttaggggttatattactgtgtaacaaaatggacggttatttctattcattaacaagattcaagtaatagcctctttagccacatattccttaataacacctttagaccttataggggtaattattttctatatacttttccaatgtatttgaaagtttgttggctcttcttccgtaattatactatatcctcagtaaagaaagtttggcatacagaaaagttgaaggaagaaaattttcaatcactgttgttccactaccaagaaataatacttggaggtatttcctttcaatcttcaacatgaggatgctaatgtccccctnataaggggccttaaagtcactgactctgtgcactatttcatgagaacattg

SEQ ID NO: 8116 - DNA, 563 bp, Homo sapiens
  unsure (561): n=A,T,C or G
aggacctgaaggaggggaagccttatctggtcctgggacttctgtggcaagtcatcaagattgggttgtttgctgacattgaactcagcagaaatgaagctctgattgctcttttgagagaaggtgagagcctggaggatttgatgaaactctcccctgaagagctcttgctgaggtgggctaattaccacctggaaaatgcaggctgcaacaaaattggcaacttcagtactgacatcaaggactcaaaagcttattaccacctgcttgagcaggtggctccaaaaggagatgaagaaggtgttcctgctgttgttattgacatgtcaggactgcgggagaaggatgacatccagagggcagaatgcatgctgcagcaggcggagaggctgggctgccggcagtttgtcacagccacagatgttgtccgagggaaccccaagttgaacttggcttttattgccaacctctttaacagataccctgccctgcacaaaccagagaaccaggacattgactggggggctcttgaaggtgagacgagagaagagcggacatttngg

SEQ ID NO: 8117 - DNA, 542 bp, Homo sapiens
caaaacgcagcagtatgactgcaaatggtacattccgctcacggatctcagcttccagatggtggatgaactggaggcagtgcccaacatccccctggtgcccgatgaggagctggacgctttgaagatcaagatctcccagatcaagaatgacatccagagagagaagagggcgaacaagggcagcaaggctacggagaggctgaagaagaagctgtcggagcaggagtcactgctgctgcttatgtctcccagcatggccttcagggtgcacagccgcaacggcaagagttacacgttcctgatctcctctgactatgagcgtgcagagtggagggagaacatccgggagcagcagaagaagtgtttcagaagcttctccctgacatccgtggagctgcagatgctgaccaactcgtgtgtgaaactccagactgtccacagcattccgctgaccatcaataaggaagatgatgagtctccggggctctatgggtttctgaatgtcatcgtccactcagccactggatttaagcagagtt

SEQ ID NO: 8118 - DNA, 408 bp, Homo sapiens
ccgcactagaaagttcatgaccaaccgactacttcagaggaaacaaatggtcattgatgtccttcaccccgggaaggcgacagtgcctaagacagaaattcgggaaaaactagccaaaatgtacaagaccacaccggatgtcatctttgtatttggattcagaactcattttggtggtggcaagacaactggctttggcatgatttatgattccctggattatgcaaagaaaaatgaacccaaacatagacttgcaagacatggcctgtatgagaagaaaaagacctcaagaaagcaacgaaaggaacgcaagaacagaatgaagaaagtcagggggactgcaaaggccaatgttggtgctggcaaaaagccgaaggagtaaaggtgctgcaatgatgttagctgtgg

SEQ ID NO: 8119 - DNA, 567 bp, Homo sapiens
cctgaacttctccccagcaaatgaagttagttgctttagaaagagatttagaactctgtcttacagcatacttctccccctaggcaagtctctatctctggagctggggaacaatggtgcacttctctttgaatgacaacccagctagaggacaaaaacactttgtggagttggggcaacagcctcgggtctcaacttgcctctcccaatgtggaactgctggattacaagctggggcatgggtgactgtgccttcagtattctcagtggtactgtacacaggtacagcctctgtaccatgagtaagaaatagttcctgcctctcagccccactcatccagaacttgacctcaccaacaggccactaaaaaaaaaaatcttgatatcctattcctttgagaaagataccctccaactaggaaataaaggaacaggtaatcttgtgttcttggctgcaccagtctggagtgaagtttctatctcagcaagctgggaaagaggaaaaggagtgggtcttggttcaataccacagaaattcaatgttcttaccaagttttagtagatatt

SEQ ID NO: 8120 - DNA, 493 bp, Homo sapiens
  unsure (408): n=A,T,C or G
gggatggggaggttgcgatgggccgagattgcaccactacaccccagcctggataacaagagtgaaactccgtctcaaaaaataaaaatagaaaaggactcagaagccaacttgaagtgcctctcgctgccaaagataggatagtctgagaataaaaagaataatgactgcaattagttgaaacacatggaaataaaaagaaacgtaaggtcatagtgatactttttaaaaggccaaggaaacacagtgaaacaaaattcattggtcccattagagtaatagggcaccaattccttactttgaaatttggcaattaaaggaacagaattcagcatttattctgcctttcctgaatgaactgtattttagagtaaccaaatagtcctagttgatgagggaatattttgntcgtttaatatgaaaaaatattctgatgtttagtttaaagaaaaatggactccaaatatttcacttagtatactagagtatttca

SEQ ID NO: 8121 - DNA, 284 bp, Homo sapiens
ccaattgatttgatggtaagggagggatcgttgacctcgtctgttatgtaaaggatgcgtagggatgggagggcgatgaggattaggatgatggcgggcaggatagttcagacggtttctatttcctgagcgtctgagatgttagtattagttagttttgttgtgagtgttaggaaaagggcatacaggactaggaagcagataaggaaaatgattatgagggcgtgatcatgaaaggtgataagctcttctatgataggggaagtagcgtcttgtagacctac

SEQ ID NO: 8122 - DNA, 568 bp, Homo sapiens
  unsure (549): n=A,T,C or G
  unsure (562): n=A,T,C or G
atgaaggcagaagactatgatgttgtaaaagttattggaagaggtgcttttggtgaagtgcagttggttcgtcacaaggcatcgcagaaggtttatgctatgaagcttcttagtaagtttgaaatgataaaaagatcagattctgcctttttttgggaagaaagagatattatggcctttgccaatagcccctgggtggttcagcttttttatgcctttcaagatgataggtatctgtacatggtaatggagtacatgcctggtggagaccttgtaaaccttatgagtaattatgatgtgcctgaaaaatgggccaaattttacactgctgaagttgttcttgctctggatgcaatacactccatgggtttaatacacagagatgtgaagcctgacaacatgctcttggataaacatggacatctaaaattagcagattttggcacgtgtatgaagatggatgaaacaggcatggtacattgtgatacagcagttggaacaccggattatatatcacctgaggttctgaaatcacaagggggtgatggnttctatgggcganaatgtg

SEQ ID NO: 8123 - DNA, 252 bp, Homo sapiens
ctggcttcccacttcttggtacccggttaactgccaggtgggtgacagtgatgccaggctcgcccactactgcactggacacagcctcaccaatgccaccttcataataatggtcctccacggtgaggatcctgcccttggtggcacgagcgctgtcgagaatgagttttctgtccaggggcttgatggtgaaggggtccagcacgcggatgttgatcttttctttcttcagcagttcggcagcggccaagg

SEQ ID NO: 8124 - DNA, 454 bp, Homo sapiens
ctggcttcactgctcaggtgattatcctgaaccatccaggccaaataagcgccggctatgcccctgtattggattgccacacggctcacattgcatgcaagtttgctgagctgaaggaaaagattgatcgccgttctggtaaaaagctggaagatggccctaaattcttgaagtctggtgatgctgccattgttgatatggttcctggcaagcccatgtgtgttgagagcttctcagactatccacctttgggtcgctttgctgttcgtgatatgagacagacagttgcggtgggtgtcatcaaagcagtggacaagaaggctgctggagctggcaaggtcaccaagtctgcccagaaagctcagaaggctaaatgaatattatccctaatacctgccaccccactcttaatcagtggtggaagaacggtctcagaactgtttgtttcaattgg

SEQ ID NO: 8125 - DNA, 487 bp, Homo sapiens
ccaagacagcctgtttcagagggttgttttgtttggggtgtgggtgttatcaagtgaattagtcacttgaaagatgggcgtcagacttgcatacgcagcagatcagcatccttcgctgccccttagcaacttaggtggttgatttgaaactgtgaaggtgtgattttttcaggagctggaagtcttagaaaagccttgtaaatgcctatattgtgggcttttaacgtatttaagggaccacttaagacgagattagatgggctcttctggatttgttcctcatttgtcacaggtgtcttgtgattgaaaatcatgagcgaagtgaaattgcattgaatttcaagggaatttagtatgtaaatcgtgccttagaaacacatctgttgtcttttctgtgtttggtcgatattaataatggcaaaatttttgcctatctagtatcttcaaattgtagtctttgtaacaaccaaataaccttttgtacaag

SEQ ID NO: 8126 - DNA, 606 bp, Homo sapiens
  unsure (589): n=A,T,C or G
  unsure (599): n=A,T,C or G
ctgtggaaagaagtcgcaaaacactggaagcaagagaaaaagaggaagaaatgaacagagagaaagaattaagaagacaaaatgaagatattgagccaacatcctcaagatcaaatgtggtcagagattgctccaaatcatcttccagggatacgagcagcagtgaaagtgaacagagttctgactcttctgatgatgagttaattggccctcctttaccccctaaaatggtaggaaaaccagttaattttatggaggaagatatcctcggtcctttacctccacctcttaatgaagaagaagaagaagcagaggaagaagaagaggaagaggaggaagaggaaaatcctgttcacaagattcctgactcgcatgagataacgctgaagcatggcactaaaacagtgtctgctttgggtctggatccctcaggtgcccgtttggtgacaggaggatatgactatgatgttaagttttgggattttgctggaatggatgcttcttttaaggcatttcgatcccttcagccctgtgagtgccatcagatcaagtcattacagtatagtaacacaggagacatgattcttgntgtatctggnaagctct

SEQ ID NO: 8127 - DNA, 567 bp, Homo sapiens
ctgggagagctagactaagttggtcatgatgcagaagctactcaaatgcagtcggcttgtcctggctcttgccctcatcctggttctggaatcctcagttcaaggttatcctacgcagagagccaggtaccaatgggtgcgctgcaatccagacagtaattctgcaaactgccttgaagaaaaaggaccaatgttcgaactacttccaggtgaatccaacaagatcccccgtctgaggactgacctttttccaaagacgagaatccaggacttgaatcgtatcttcccactttctgaggactactctggatcaggcttcggctccggctccggctctggatcaggatctgggagtggcttcctaacggaaatggaacaggattaccaactagtagacgaaagtgatgctttccatgacaaccttaggtctcttgacaggaatctgccctcagacagccaggacttgggtcaacatggattagaagaggattttatgttataaaagaggattttcccaccttgacaccaggcaatgtagttagcatattttatgtaccatggttatat

SEQ ID NO: 8128 - DNA, 605 bp, Homo sapiens
  unsure (505): n=A,T,C or G
  unsure (577): n=A,T,C or G
gcactaaaatggagtggagagttggggtggaaataagacatccttaaaaggttaaattgtctgcaaagcacctagcccagtgccgagctcccagtaggtgttcagtaaagcttagtgcctgactttctgaacactgattcctcctgtttggagtcactgggatactctcattgccgttgggatgttcctcactccttcccagttcgtggctgaggcagaacccagactgaagagggaagagacattccagaggaggattgccttcgtcagggtaagggatgggctgctcaggggccctacccttcacccccttctgtatcagattggccctcccactcccatctcactctgcgtgtacaatcttccatatccgcaagttcactggcactcttctggcacctgggcaagatcccagaacagaggatggagtgactggcctcacagagcttagtgcccgactcaggggaaatgggactggtgcatgggaaatggtcagcctaggatnggacacgagagtctgaaattcaaagcaaccagcttgaagtggtttgagaagctggaagcaaacatgggctanagagatagggcagaagtcaagacgagga

SEQ ID NO: 8129 - DNA, 317 bp, Homo sapiens
gcctagctgtggagaagagaattacttccccactgatggagcccagcagcattgagaaaattgtagagattgatgctcacataggttgtgccatgagtgggctaattgctgatgctaagactttaattgataaagccagagtggagacacagaaccactggttcacctacaatgagacaatgacagtggagagtgtgacccaagctgtgtccaatctggctttgcagtttggagaagaagatgcagatccaggtgccatgtctcgtccctttggagtagcattattatttggaggagttgatgagaaaggaccccag

SEQ ID NO: 8130 - DNA, 608 bp, Homo sapiens
  unsure (511): n=A,T,C or G
  unsure (598): n=A,T,C or G
ctgctggagtagctcgtggtgctgattgatctgcttggagattcttgtgcatcttcacctgttagagctggaaagatgctcaggactatacagcccagcccttctggtttacatataatgaaactaaggcccaccttagtcaactaatgtgcttaaactcaagcaaatggcaaatggcaaaactcaggactctgtcaatgagttttcattctttttctttattcttctagacacatattttataaagaaatgaggcagcatgatgtttaaaatacttaaagtgagaatgagaaaaactgatgtctacatatcatgaaatggttaaaaagtttaacgtgcattgtcttctccattagaacttcttttacgaatttttttctcaaaatctggctcagaaatcttgttttaaaagctccctaaacattcctaggcagaattagtaacgccttcctctttgctaacaaggaactgtgcatattcctgtaatagaatacttaccatattatattgnaagtattaaattattcatctgccctcctcccacctacccactggatcaggcttcccaggaacagcaacagagagcccagcaatttgngtgttctcag

SEQ ID NO: 8131 - DNA, 540 bp, Homo sapiens
ctgatatgctttattgtgccgagtcccatatccgaatgattaagactggagaaagtggcatgatagttttccggcttcttacaaaaaacaaccgatggacttgggtccagtctaatgcacgcctgctttataaaaatggaagaccagattatatcattgtaactcagagaccactaacagatgaggaaggaacagagcatttacgaaaacgaaatacgaagttgccttttatgtttaccactggagaagctgtgttgtatgaggcaaccaacccttttcctgccataatggatcccttaccactaaggactaaaaatggcactagtggaaaagactctgctaccacatccactctaagcaaggactctctcaatcctagttccctcctggctgccatgatgcaacaagatgagtctatttatctctatcctgcttcaagtacttcaagtactgcaccttttgaaaacaactttttcaacgaatctatgaatgaatgcagaaattggcaagataatactgcaccgatgggaaatgatacta

SEQ ID NO: 8132 - DNA, 608 bp, Homo sapiens
ctgacatcctaaaaacgaagtcaaattagggaaggatggccgtttccttgagtcaaaagcccagcaggattgcattataatgtatatttcttctgtagcataaaatggctgatccattttaaatccattttgaatcagtttgtagaagttagcatcaaccggaatgccagggtaagaattcacaccaagtgagaagatttcccacagtaatattccatatgaccagacatcactcttaatggtgtagatgccttcaaacaggctttcgggggccatccattttacaggcagacgggcattgcccctgacaacatagttggaatcactcatgatatctcgagccaatccaaagtcacatatcttcaccactttcccgtgggtgacaagcacgttcctggcggccaggtctctgtgaacacacgacttaaattccagaaattccattcctttggcaacttgatatgcaaagcaaagaagatcttcaaatgtaagcacattcaagtcctcctcttcttccagccttttttggttttcatattcaatttcatcttcagagtgaaatgaattcccatgaagccctgagatttgatccgagtccgggtgtatct

SEQ ID NO: 8133 - DNA, 367 bp, Homo sapiens
ctgttaattctaaaatgaaaccagtcagaccactgacttataaaaatatggtactcatatagatttagcattataaagaaggaatatattatttaaaacatttaaatagtgcatatggacatttttgcatgtggtatataaaataaaacattcatataagatacacagtgcacataaaattagatgtttggatacactcctatctggagactgaaggaaattatctgaaatgtacactgcatgatggattcaaataaaaatgatacatcttttggtattttcaatttcacttttctaggtatacattatgaataacctagttgtatcaaaaggaaaccacacaaaaagggcaggatttagtgctttt

SEQ ID NO: 8134 - DNA, 567 bp, Homo sapiens
  unsure (554): n=A,T,C or G
gctagactaagttggtcatgatgcagaagctactcaaatgcagtcggcttgtcctggctcttgccctcatcctggttctggaatcctcagttcaaggttatcctacgcagagagccaggtaccaatgggtgcgctgcaatccagacagtaattctgcaaactgccttgaagaaaaaggaccaatgttcgaactacttccaggtgaatccaacaagatcccccgtctgaggactgacctttttccaaagacgagaatccaggacttgaatcgtatcttcccactttctgaggactactctggatcaggcttcggctccggctccggctctggatcaggatctgggagtggcttcctaacggaaatggaacaggattaccaactagtagacgaaagtgatgctttccatgacaaccttaggtctcttgacaggaatctgccctcagacagccaggacttgggtcaacatggattagaagaggattttatgttataaaagaggattttcccaccttgacaccaggcaatgtagttagcatattttatgtaccatggntatatgattaatc

SEQ ID NO: 8135 - DNA, 594 bp, Homo sapiens
ctgttgttaaaaaggaggaaaaagtgcttcatgaattatttgggacggacataaggtgctgtgccagaaatgaactgggcagggaatgcaccaggctgttcacaatagatctaaatcaaactcctcagaccacattgccacaattatttcttaaagtaggggaacccttatggataaggtgcaaagctgttcatgtgaaccatggatttgggctcacctgggaattagaaaacaaagcactcgaggagggcaactactttgagatgagtacctattcaacaaacagaactatgatacggattctgtttgcttttgtatcatcagtggcaagaaacgacaccggatactacacttgttcctcttcaaagcatcccagtcaatcagctttggttaccatcgtagaaaagggatttataaatgctaccaattcaagtgaagattatgaaattgaccaatatgaagagttttgtttttctgtcaggtttaaagcctacccacaaatcagatgtacgtggaccttctctcgaaaatcatttccttgtgagcaaaagggtcttgataacggatacagcatatccaagttttgcaatcata

SEQ ID NO: 8136 - DNA, 515 bp, Homo sapiens
gtggaggcactcttcagttatgaggctacccaaccagaggacctggagtttcaggaaggggatataatcctggtgttatcaaaggtgaatgaagaatggctggaaggggagtgcaaagggaaggtgggcattttccccaaagtttttgttgaagactgcgcaactacagatttggaaagcactcggagagaagtctaggatgtttcacaaactacaaagctgaagaaaatgaagccctattacttgtttgtaagatttagcacccttctgctgtatactgtactgagacattacagtttggaagtgttaactatttattccctgttaaaatttaacctactagacaatgatgtgagtacccaggatgatttcctggggcacagtgggtgaggagatggggacaggtgaatggaggagttaggggagaggaaaagtggatggaagtgtctggaaagggcacgagagagtcttccaggtactgatcctgtttcttgctctgagtgctagctagccag

SEQ ID NO: 8137 - DNA, 501 bp, Homo sapiens
ctgcttttccttgctttaaaataagctaccagtaattctaaatcagactaaaatgtactgttcctagaccaaatacaggcattcatccttgcaaaaatgttttgcaatgagttcttggcctatatgaaaagcatcaaatagctaaggagagactagaatttatttccaaattctgtgactgacttccaataatcccttatcagtacgagtaccaggaaaatatcagatattaaagatcagatttaattctttggtataagcatgaaactgttactgatagctttccatggcgagcataaaccatgaagcaactcaagaagcatgagagacaacaatgaaatctagtatacaatgcagggcaggccaagaacgatgtctgctttacaggaaaagtcaacactaacaatctactcctgagaaactaacacctatttagatgtttttaacataatggcaaactaaaatgtcaagcttcaaaatgaccaaacttgtaacgtacag

SEQ ID NO: 8138 - DNA, 563 bp, Homo sapiens
ggacgttctgccaaactcagatttcctggtgcatttttaccttgtgatgcacctgggattaaccagcgaggatcaggatatcttaaatacgatcataaggcactgtccaccccgctttttctccctgggttttcctggcttctcaatgctggtgggggacttcatcacggccgctgccagggtccttagcacagacattttgacggcgcctcgttcagaggctgtcactgtcctcggctctctggtctgctttccaaatacctaccaggagattcctttactgcagtcagtgccagaagtaaatgaggccattacaggaactgaagatgtcaagcattacctcataaatattttactgaagaatgccacagaagaaccaaatgaatatgcaagatgcattgctgtttgctcccttggggtctggatatgtgaagagcttgcacagtgtacaagccaccctcaggtgaaagaggccatcaatgtgataggagtaactctgaagtttcccaacaaaatcgtggcccaggtagcttgcgatgtccttcagttgctggtttcctact

SEQ ID NO: 8139 - DNA, 166 bp, Homo sapiens
cttttgttcagtaaagcccaaaatctaggccaatggttctcaaagtgtagttccaggagcagcaacagcagcatccctggagagggagaaagagagagagagtgtatgtgtgtgtgtgtgtatgtgtatgtgtgtgtgtgtgtgtgtgtgtgaagctgtttgtata

SEQ ID NO: 8140 - DNA, 188 bp, Homo sapiens
  unsure (118): n=A,T,C or G
ctgagaagctgatagaggagaagggagctgtggaagctctggcagcagcactggcccatatttcaggtgccacgtccgtagaccagcgctccttgatcaactcaaatgtgggttttgngaccatgatcttgcagtgctcaattgaaatgccaaatattagttatgcttggaaagaacttaaagagcag

SEQ ID NO: 8141 - DNA, 284 bp, Homo sapiens
  unsure (21): n=A,T,C or G
  unsure (24): n=A,T,C or G
  unsure (36): n=A,T,C or G
  unsure (42): n=A,T,C or G
  unsure (47): n=A,T,C or G
  unsure (49): n=A,T,C or G
  unsure (64): n=A,T,C or G
  unsure (169): n=A,T,C or G
  unsure (219): n=A,T,C or G
  unsure (221): n=A,T,C or G
  unsure (230): n=A,T,C or G
  unsure (243): n=A,T,C or G
  unsure (246): n=A,T,C or G
  unsure (248): n=A,T,C or G
  unsure (271): n=A,T,C or G
  unsure (279): n=A,T,C or G
cctttttaagatgatactttnganatgcacgatatnatgagngggangnttttaaaaacgcctntttaataaactacctctaacactatttctgcggtaatagatattagcagattaattgggttatttgcattatttaatttttttgattccaagttttggtcttgtnaccactataactctctgtgaacgtttttccaggtggctggaagaaggaananaacctgatntagccaatgctgntgnantcgtttcctcagcctcatctcantgtgctgnggtct

SEQ ID NO: 8142 - DNA, 604 bp, Homo sapiens
  unsure (596): n=A,T,C or G
ccactcgagcacggtagggacagttcacaggtatatgaagataattgggtcccaggcgatggcggtgagtgtcaggataggcaaaaaggcggccctgaagcattttgtcaggactggcctcaatgccaggtggcatgttgcttgggtcgaaggctatctgttcaacctcagcaaagtaattaactggattccggtttaagaccagtttaccaactgggatgagagggtagtccttgtgaggccaaaccttggtgagatcgaatggattaaatggaaaagtttctgcctgattaaatgtcatgacctggatgtaaaaagtccaggaggggtactttcctgtggcaatggcgttaaaaagatcccggatgccatagtcaggatcttcctgggaaagtctcgccgcatcttcaacagaaaggtttttgatgccctggtcagtcttataatggaatttgcaataaactgcctccccatttgcattaaccagcttgaaagtatgtgatccatatccattcatgtggcgatgtccatctggaatcccccgatcactgaacaagaaagaaacctgatgcagagactcaggacgtaggctccanaagtccca

SEQ ID NO: 8143 - DNA, 600 bp, Homo sapiens
  unsure (488): n=A,T,C or G
  unsure (511): n=A,T,C or G
atgactttagtcccagctacttggggggctgaggcaggagggtcgcttgagcccaggaaagttcgagtccaagctgggcaacagagcaaaaccttgtctcttaaaaaagaaaaaaaatagagttcagaatagataaaagagttgttattctaagaaaatagactactgaaggagaaaggctttaataatattaaaaataggcaaggtaatgcttttcatagtatagtaagatttgcctaataccatcttatttctttgattaaaagttacttagcttcagcatgcgtgtacattcaaaatacaaaattaaagcatgagttgtcattaatttgcagaattctatgattgaagcctctaaatgaattgtgcaggagagggagtttgtaaacaactgactacagacattcacattgggtcatctttaaaaagctggactctgcttttggatgcttctcggaggcgagttggattttggactgaagtactgncgttccattcctttttttgaggngttatgagtggggctataacatcgccatcctgcggcttggtgaaatttctgtctgcacaccactgaacaaaatattgtcttgcggcata

SEQ ID NO: 8144 - DNA, 595 bp, Homo sapiens
  unsure (513): n=A,T,C or G
ccagctagtcacagttgttgggtcagtagtacagtgctcaagaacaattcagactaacatgccaaggagcctgaggaaaagtctggtagtcatggctctcccagccagcattcccagtgggggaaactagaagacaccagcctggagaggctgaatattcaggagtccctgagatggggaatggaacagaggaaagtgtcttttgactcatcttaagtactcccctccccaaatagaaacctcaaagactgatccatttcccctagggcctgggccaggagtagctcactgctcactgctgaggagaaaggcacaagatataatgtcataagagcaggacagtggctcagcctacagagttccctataggggaaagaaggcaggaaataggcgcagggtctggtcctgtccctgcaccaccctgagtagctagtcttgggaagggattacaggccctgggccataggctgctcgccattctgctttcctatcctgtttctctccctgtgctgntcccttttagccagggctgagaaatgttcagcacctgaggcaaaactgccatagtacctctgaaagctgaatcaagggggaa

SEQ ID NO: 8145 - DNA, 465 bp, Homo sapiens
taaatctgtatcaagacggttcttttctagatttcctctacctttttgctcttaaaactgcttctctgctctgagaagcacagctacctgccttcactgaaatatacctcaggctgaaatttggggtgggatagcaggtcagttgatcttctgcaggaaggtgcagcttttccatatcagctcaaccacgccgccagtccattcttaaggaactgccgactaggactgatgatgcattttagctttgagcttttgggggttattctaccaacaaacagtccattggaaagaaaacagtccctggaattaacagatcagaatgttcacactggttaatctttttttaacaatgagcatgaaggtagcagaagctggtgtgtttccagatggttcttctaaccaaactaatttttcactgttgacaagcgaggcaagggttgcactggaccaaaggctgaggcttgg

SEQ ID NO: 8146 - DNA, 597 bp, Homo sapiens
  unsure (543): n=A,T,C or G
cctggtgcctacagcacaggctacgggggctacgaggagtacagtggcctcagtgatggctacggcttcaccaccgacctgttcgggagagacctcagctactgtctctccggaatgtatgaccacagatacggcgacagtgagttcacagtgcagagcaccacaggccactgtgtccacatgaggggcctgccgtacaaagcgaccgagaacgacatttacaacttcttctctcctctcaaccctgtgagagtccatattgagattggcccagatggaagagtgacgggtgaagcagatgttgagtttgctactcatgaagaagctgtggcagctatgtccaaagacagggccaatatgcagcacagatatatagaactcttcttgaattcaacaacaggggccagcaatggggcgtatagcagccaggtgatgcaaggcatgggggtgtctgctgcccaggccacttacagtggcctggagagccagtcagtgagtggctgttacggggccggctacagtgggcagaacagcatgggtggntatgactagttttgttaggaacatttgagttacttcaatcattttcacaggcag

SEQ ID NO: 8147 - DNA, 536 bp, Homo sapiens
ccaggcaggtctcgaactcctggcctcagatgatctgcccaccgtagcctcccaaagtgctgggattacaggtatgagccactccacccagcccagagttttcatttgttccttaaaataattaagctggaaaggcaaggacaattatgagcacaactgtagtcaagttgagaagacctcaaaaaagtcaagtttagaccttcggattttccatagaagagaaaaagatactaggttttagggtacagagagccagatctgaagagtagctgcagggggaaggtgctgttagaaggaggatatagacacattctctggggggaacatatggtgactgacccatgcacacaaagggggccttagcgaaactgcagaggactgatccttaaaccaatcacatctttgccaatctctgtcactgtggtgaccctgcagatttgacctttgaactcaggggaatagcaggccccactgagtggacacttttctactggctttccacggtagatgggccgatatgatgcagcacaaatgtc

SEQ ID NO: 8148 - DNA, 392 bp, Homo sapiens; identical to SEQ ID NO: 7567

SEQ ID NO: 8149 - DNA, 467 bp, Homo sapiens
cctggacctgtgtaaaccttcaaacactcttttttacattaggtcatgaagttaaattttttactgtttctgtgctacagactcttcaaaggaaaatagttaagtcaatttcaaagaaaatgaccagcacatttttaaaacattagaaatgatttgactttgactatctactgccaaaaaaaggttaaggaatttgtaatgagaagctaaaaactttaaggaattttaaggaactcaaaacaaaaactcattaaatgtaattaaagtgaattctacaaataaagcctcttaatacatttctataatagtcacttaagacttaaattcaaacactagcaaaccacaaaatcagactgtatgactgacatccaaaagataaatataaatcaaaatccgaccccagcattagccaaggggtaggtgttcctcttgaggaaggcaggaattcctcttctgccacctgttgg

SEQ ID NO: 8150 - DNA, 564 bp, Homo sapiens
  unsure (562): n=A,T,C or G
ctggtgggagggatgaaggaaattatctggacgatgctctcgtgagacaggatgcccaggacctgtatgaggctggagagaagaaatgggggacagatgaggtgaaatttctaactgttctctgttcccggaaccgaaatcacctgttgcatgtgtttgatgaatacaaaaggatatcacagaaggatattgaacagagtattaaatctgaaacatctggtagctttgaagatgctctgctggctatagtaaagtgcatgaggaacaaatctgcatattttgctgaaaagctctataaatcgatgaagggcttgggcaccgatgataacaccctcatcagagtgatggtttctcgagcagaaattgacatgttggatatccgggcacacttcaagagactctatggaaagtctctgtactcgttcatcaagggtgacacatctggagactacaggaaagtactgcttgttctctgtggaggagatgattaaaataaaaatcccagaaggacaggaggattctcaacactttgaatttttttaacttcatttttctacactgnta

SEQ ID NO: 8151 - DNA, 596 bp, Homo sapiens
  unsure (351): n=A,T,C or G
  unsure (571): n=A,T,C or G
ccagtggaatgatgttccctgcaattaccatctcacctatacgtgcaagaaaggaacagttgcttgcggccagccccctgttgtagaaaatgccaagacctttggaaagatgaaacctcgttatgaaatcaactccctgattagataccactgcaaagatggtttcattcaacgtcaccttccaactatccggtgcttaggaaatggaagatgggctatacctaaaattacctgcatgaaccgtaagtggtcctttagaaagaatggactaccgtgctataacaactactagacaccttcattttacggctgtggtatcggcagtttagggtatggagcaagtaatattgngtgttttctttttttctttctttccttccatgtagcatctgcataccaaaggacttattctatgaaatactttaaaaattcctcatcagcaaaggacaattcaataaatacatccaaacatgatcatcgttggagccggaggtggcaggagtcgaggcgctgatccctaaaatggcgaacatgtgttttcatcatttcagccaaagtcctaacttcctgngcctttcctatcacctcgagaagta

SEQ ID NO: 8152 - DNA, 547 bp, Homo sapiens
  unsure (516): n=A,T,C or G
ccactactatgagcagggagttcaggctgtccccttgggacctcgctttgtcccaggcacagtcaccctttccataaccatcactagaaatcccaaaccccagaatcctgctcacctaagctcaaagaaggaagctgttgctggcaggtgcttctcagaagtctggcacatctgtgtatttcttgtctaattcttctcattggcctggagcatctcttcacatttttctctagagagcctggcacttttttttccccaacaacctgaccattttatcttctcagtctagggcttctggggtcaaaagaaaggactgaaatacagtatcacctatatgaatgtctgctcctgagggaagttaacaaaagccagattagatactgactggattttggtgtctctctcaagtggagaagatgtgaatagaaacagaagtttacaaaacactatagcctaacaaataggtaaaagctgtgatttaaagctggctcaagactggcccaggcataatactgncaatctaaaggtaaccggcaacatcaaaaag

SEQ ID NO: 8153 - DNA, 591 bp, Homo sapiens
  unsure (28): n=A,T,C or G
  unsure (56): n=A,T,C or G
  unsure (68): n=A,T,C or G
  unsure (76): n=A,T,C or G
  unsure (107): n=A,T,C or G
agcggattctgcttttaggagtacccgncaacaagcgggaccgagcaggaatccgnatctgggaacanagcccttngctcctccctcagaatgaacggagaccaganttcagatgtttatgcccaagaaaagcaggatttcgttcagcacttctcccagatcgttagggtgctgactgaggatgagatggggcacccagagataggagatgctattgcccggctcaaggaggtcctggagtacaatgccattggaggcaagtataaccggggtttgacggtggtagtagcattccgggagctggtggagccaaggaaacaggatgctgatagtctccagcgggcctggactgtgggctggtgtgtggaactgctgcaagctttcttcctggtggcagatgacatcatggattcatcccttacccgccggggacagatctgctggtatcagaagccgggcgtgggtttggatgccatcaatgatgctaacctcctggaagcatgtatctaccgcctgctgaagctctattgccgggagcagccctattacctgaacctgatcgagctcttcctgcagagttcctatcagact

SEQ ID NO: 8154 - DNA, 460 bp, Homo sapiens
ctgctcttcctaatgttggtccagtcctttaaacctgccctacggattctagtctgcccttctttgcccttaattgcttgacctcttatgcttgcctttttttttttttatcacttattttgttcatgttaaacactaagttaaaaaattttaaaatgaatgatgccacatttctatataaagaaatgagcattattaatccctgttgttgtaaaacatcattgaaattgtatgctattctctttatataaagtcattctaattatgtcacatgttgaagatgtaaccaaactattataaaggctgcttatccattcacatattgaatagattaagtttgggttttttaagattgttaatttgttattttctctttcctctagtcaaagtgggaaaaagcccaccggtgaggggctccctctctggaaaagtcagcctaccttgtcatttttcaacgatg

SEQ ID NO: 8155 - DNA, 444 bp, Homo sapiens
ctgttcttagaaagcattccatatagttatccagagcactcaagttttggttctcttttacatagctgcattcggagatactctatgtgagacatgtttaaaaaaagagaaacatttatacctggaatttatattcttccaagtaatcttttagtcttgttggtaaaggcagtccccagatggcaccggtacatttgttaatggtgagcctacagagatgctgcagagatggtgctgacgtgtagagcggtttggtcagataaaggtgaacagtgccgttccggggggcttctggacctgtccgcttatccttgcacatctgaacatagtagtcgatcagatgaaccacactgtcaaattgtttaagcttggatttgacacatatgatagagtccaatctgaattttccgtcttggtattcgattcgaagattagttggtccag

SEQ ID NO: 8156 - DNA, 605 bp, Homo sapiens
ctgtcagcttcagcagaccttggaaaggaaaatggtttgccttagttttacagtttgttttgagaaagaaaaccattcatttgtatcctttctaagttgcaatataaataactgtcattgttcttgtattcttcacaataatgtccattaaacatatatgtatcacatattttacctcactagggactaaggcattgcattatgtcaggattgtattacttttccctctcatattcgtgtcttactcttaataggaagtatgagtaaatcaggtatttttctaaaggtaattttcatttatttagaacacatttctttttggtgacataaattatcaggaacatcatcactccggaaaaaatacagtgggggttctcttgtacataatcctttgaaaataacattgaactaaacatgaaacatacatttatttctctgaaataatttctcttgaatatttctacaaaagtaatttttccccacatctgttattgtctttaatctcctagtccccagaactatctataaccaagttagttccattatttaatctctactcatcacaccacacaaaccccaaaatacaggtagtcagtcacaaaata

SEQ ID NO: 8157 - DNA, 467 bp, Homo sapiens
  unsure (245): n=A,T,C or G
  unsure (266): n=A,T,C or G
  unsure (450): n=A,T,C or G
  unsure (456): n=A,T,C or G
ctgagtctgtcacttctaaaaagacaggaccccttagtgcccagccctctgttgaaaaagagaacttggcaatagaaagtcaatcgaaaactcagaaaaaagggaagatatctcatgacaaaaggaagaaatcaagaagtaaagccataggctcagatacttctgacattgtgcacatttggtgtccagaaggaatgaaaaccagtgacatcaaggagttgaatattgttttgcctgaatttganaaaacccacctagagcatcancaaagaatagaatctaaagtttgtaaggcagccatcgccacattttatgttaatgttaaagaacaattcatcaaaatgcttaaagaaagccagatgttgacaaatctgaaaaggaagaatgctaagatgatttcagatatcgaaaagaaaaggcagcgtatgattgaagtccaggatgaactgnttcggntagagccacag

SEQ ID NO: 8158 - DNA, 500 bp, Homo sapiens
  unsure (119): n=A,T,C or G
  unsure (380): n=A,T,C or G
  unsure (401): n=A,T,C or G
  unsure (412): n=A,T,C or G
  unsure (438): n=A,T,C or G
  unsure (440): n=A,T,C or G
  unsure (451): n=A,T,C or G
  unsure (470): n=A,T,C or G
  unsure (482): n=A,T,C or G
  unsure (496): n=A,T,C or G
ccaagaattcaaggacttgtaggagataagtgaaggctattacagggattttgtcctggtttggtaggtttctcttggagaaataccactacaccctggtctagaaatgagttttgaanacttggggagttaaagggcactgagttttgctctcaccgtaccctgattccaggttttacatggagaaataacctgagggactttatttctatccaatgccctggtttccatcctgaccagaggatgatgacatccgctgataggccatgcttctgtcttctcttatgtgcctcatgccaagcctcgaaatataccttctggaccatcatttccacatctaccttgtgactagaagtcctagttatggtattttgaaattnatgatccataatccttgccanaaatcctgcancgaaccatggcatggcatcatcctantnattgatttcantcttttgccttttgctccnctggaatcttgngccaattgcaggangggg

SEQ ID NO: 8159 - DNA, 448 bp, Homo sapiens
  unsure (445): n=A,T,C or G
ctgctggtggagatggatggttttaatacaacaacaaatgtcgtcattttggccggcaccaatcgaccagatatcctggaccccgcgctgcttaggccggggcgtttcgacaggcagatctttattggaccaccagacataaaaggaagagcttctattttcaaagttcatctccgaccgctaaaactggacagtaccctggagaaggataaattggcaagaaaactggcatctttaactccagggttttcaggtgctgatgttgctaatgtctgtaatgaagctgcgttgattgctgcaaggcatctgtcagattccataaatcagaaacactttgaacaggcaattgaacgagtgattggtggcttagagaagaaaacgcaggttctgcagcctgaggagaagaagactgtggcataccacgaagcaggccatgcggttgccngct

SEQ ID NO: 8160 - DNA, 381 bp, Homo sapiens
ctggagcagttcaagaaggacaacgaggaaacaggcttcggctcaggcacccgggccctggagcaagccctggagaagacgaaagccaacatcaagtgggtgaaggagaacaaggaggtggtgctccagtggttcacagaaaacagcaaatagtccccagcccttgaagtcacccggccccgatgcaaggtgcccacatgtgtccatcccagcggctggtgcagggcctccattcctggagcccgaggcaccagtgtcctcccctcaaggacaaagtctccagcccacgttctctctgcctgtgagccagtctagttcctgatgacccaggctgcctgagcacctcccagcccctgcccctcatgccaaccccgccctagg

SEQ ID NO: 8161 - DNA, 313 bp, Homo sapiens
ctggtggtgattgcacacgacgtggatcccatcgaggtgcgtttgcctgttgactgctaacccaagggcttctggcagtaccaggaagagagagtagacctaatgccaagtcagtgatgggaccgaagtgggtgagggcagtactgacacagatccaacacatgcgtggctcttgcaatgatgtgaatctctcactgaattcaaccttgaagtgcgaatccatgagctttttaaccctgagcaattgttacaagctaactgaaatttgctgcttttggtcaaaatacagtcttcagctaatgctttcttccag

SEQ ID NO: 8162 - DNA, 200 bp, Homo sapiens
ctgcccttcctggacagcctatggaggctccagtcatgctgtgggatgagtccagcttccctgacatcccaggggctgtaagtgccaacatgactgtgaagggccagagtgaagaccctggctccctcctttccttgttccggcggctgagtgaccagcggagtaaggagcgctccctactgcatggggacttccacgcg

SEQ ID NO: 8163 - DNA, 459 bp, Homo sapiens
  unsure (236): n=A,T,C or G
  unsure (368): n=A,T,C or G
gctggtctcaaactcctgaccttgtgctctgcccgccgtggcctctcaaagtactgcacactatcttaaaggcagtaaatgaatctgagtaagtgagtaagcaatgacagaaaactgcttttcctaccaataaaaaacctgcatatatggtcaagtgacatgatctattcaaagtgattaaaaattgtctttgacaagagattacattaaaaaaataaattttttttactgacctnataattgatttgcattgttcattttgctgcatgttctcattatcattaacatgtatgtttaatacactgttttattacagtatgtataattaatatactgctttattacatgtactaaactagactcatatncacttaaaaaaaaaaagatatgtggagatatccacataccataatagtcacccttttaaaggtacacaattcagtggtttttagacctcgg

SEQ ID NO: 8164 - DNA, 266 bp, Homo sapiens
cacgcccagctaatttttgtatttttttagtagacatggggtttcgccatgttggcgaggctggtctcgatctcctgaccttgtgatccacccacctcggcctcccaaagtgctgggattacaggcgtgagccactgcgcccggccacattcagttcttatcaaagaaataacccagacttaatcttgaatgatacgattatgcccaatattaagtaaaaaatataagaaaaggttatcttaaatagatcttaggcaaaataccag

SEQ ID NO: 8165 - DNA, 477 bp, Homo sapiens
atcacctggagcgtgaagggccacatgtattgtttggaaggccatctggagcctacattctagtaggagagggaagaaacagatgtagccaaccacagtatgaggtggaaacataaaattacaaagggaaaagaagagaatgacttacagttagatcactggtccttagcctggttgctcattggattcacctggggagtttttagtcgtctcatgccagccccgttgcacccaggaccagtcaaatcagaatctgtgagggcatagtcagggagcatgagtaggagattccagtgtgcagccaaagttgagagctagggaacagatgggggtggggtggagaggcaggccaacaagttgcaagtaattcaaatctccattggaaggggcttctcacagagcaaggcggcagctccagggctctctagtcctttccctcagctatcctctgccactgccatgcagatggcaagatgg

SEQ ID NO: 8166 - DNA, 297 bp, Homo sapiens; identical to SEQ ID NO: 7858

SEQ ID NO: 8167 - DNA, 527 bp, Homo sapiens
ttttttttttggtataaaagcatttttaaactttattattaatactcaggacattaggaatttccagatttttttcagtagcatttgtagaaccacttttggtaacaaatacagtagttaggaatatgcatccaattcagaatgcataataatgtttatcctgaatcctttccggctaaaaacagggctggcgctgtgatgagatatagaacgagaatctacaaaaaacactgtaacatgtttgttttttcccagaggctacatcctcttttgctggaatactttataaatacatattaaaaagtaaggcaacaactccaaacagtccaagctgtttgctcaactcttttcccaattagatttgcaatcccggtgatcaatttcatggttgtattgtttagtgtttgtctttcttatttcaaatggtccaaaaggatgtttttctcacatttctaaaacatctctggtatgtgtgttcaatgatatatgcaactaatactggtcaggtactgaagcctgtgatgtcc

SEQ ID NO: 8168 - DNA, 426 bp, Homo sapiens
cgttgaccgcatggcagctccgagagcagaggctctatttgacttcactggaaacagcaaactggagctgaatttcaaagctggagatgtgatcttcctcctcagtcggatcaacaaagactggctggagggcactgtccggggagccacgggcatcttccctctctccttcgtgaagatcctcaaagacttccctgaggaggacgaccccaccaactggctgcgttgctactactacgaagacaccatcagcaccatcaagtctgtggcctgggagggaggggcctgtccagccttcctgccatccctacgaccactgcccctcacatcaccttctcatgggtccctctcccactccaaagcccccagtggctcccagatgagccacaatgctgtaacaagccatcaacgtccagggtggcctgg

SEQ ID NO: 8169 - DNA, 131 bp, Homo sapiens
ccagtttgtaaatctgctccttcacgtcgtcagatgtcaacttcaaccaagtggggacgctgcgtcgatagggtaaagccgactgggacaggcccttcccgggagcatgcatgcgacccatgatggcggcg

SEQ ID NO: 8170 - DNA, 359 bp, Homo sapiens
  unsure (145): n=A,T,C or G
ggcgaggcaggggagctgccttcggtacataatttgaaggggcactccctcttgggcacatgccggccctgagtgcctcccttgcctcactctgatcccggccccataatgtcctcagtggaaggtgactgggggccggtgctgnggggagagtagaaagaggggttggcatgactaaaaataccagtatgtgtattaagtattttgagaatgaaatgccaaggagtgcctactgtatgccagctctgctctaggaatggagtagacagtggacacaagaaggacttacgccctgagcacaggtgccaacggtgacaagactggcaagacgtgagggcatgaatggttcattcaggcag

SEQ ID NO: 8171 - DNA, 420 bp, Homo sapiens
ctgttagatgaaaatctaaaggatgaatactttgaggaaatcatggaagaatatgaagatattagacagggccattatgagtctctcaaggagaggagatacttacccttaagtcaagccagaaaaagtggtttccaaatggattggctgtctgaacctcacccagtgaagcccacgtttattgggacccaggtctttgaagactatgacctgcagaagctggtggactacattgactggaagcctttctttgatgtctggcagctccggggcaagtacccgaatcgaggctttcccaagatatttaacgacaaaacagtaggtggagaggccaggaaggtctacgatgatgcccacaatatgctgaacacactgattagtcaaaagaaactccgggcccggggtgtggttgggttctgg

SEQ ID NO: 8172 - DNA, 640 bp, Homo sapiens
ctgacattcctgaataagaaggaagcaattgctgcagtcatccaggcaacagctatggtgccatgagtgaggaggaagcagcagagggagtcggattctggcggaggggggagtcccatgaggaaggatttacaggatgagaagtatgagaggaacacaggaattagcttattacaatacaaaaactccaacaaatatgaaagaggcaatcactaaagcagtttcagaaaaatatgctaccaaagggagaaaaggcaaagtagctgagattttcagacaatggctttagtacaaaagagaagcaaggggactatacatgtcatttcactaggttgacttttcattattgttgttgttcttaaaaccttgatctttatttttttcttaagtcgaaagctaagaatctacaaagaattatctataattggttttctctactcatgtgaattcgaaagaagccttccaaaaacgtatattgtaaattgagttgcacgaaaaaaaaaaactcattttagaatcttcttttttattaaaccaaataggcactgctggctgcttgtctcacaattctgctacacatagcagtgaggctcctgacttttacaatattccctgggactattggttgagttacccatga

SEQ ID NO: 8173 - DNA, 323 bp, Homo sapiens
  unsure (33): n=A,T,C or G
  unsure (62): n=A,T,C or G
  unsure (70): n=A,T,C or G
  unsure (75): n=A,T,C or G
  unsure (103): n=A,T,C or G
  unsure (117): n=A,T,C or G
  unsure (127): n=A,T,C or G
  unsure (178): n=A,T,C or G
  unsure (197): n=A,T,C or G
  unsure (200): n=A,T,C or G
  unsure (212): n=A,T,C or G
  unsure (254): n=A,T,C or G
  unsure (264): n=A,T,C or G
  unsure (300): n=A,T,C or G
  unsure (308): n=A,T,C or G
  unsure (317): n=A,T,C or G
  unsure (320): n=A,T,C or G
acaagcttttttttttttttttttttttttttngctattttaatattttttattaagggctntaaaaatncccanaaagataaataaatgtgatgcaatgatntctgtcctaatatnaaaaactttntttcactgcattgttttccttcacaatggccttcaaatcacaggaggcagngattccatgccatttcctnttnttttattacacnctacaggatttctgaatcagtatccccgccctcagtcttctntttataaatnaaagtcattttcaatccaccgtttaaagggagcgtntttttttnttttccacnaanagg

SEQ ID NO: 8174 - DNA, 309 bp, Homo sapiens
tcgacagcccagtagaggaaaaaggggtggtgccgtgcctgtctcttaatgaagtccagggcttcctgcaggtagatctgggtgaggttggcttcccccgtcttcagattaataggaaattcttcataatatctgccaaccatctcccagtccctgtacacagggatgttgggcctggccttgttgtcataaggtccaaagtggcagttgggggatccaaaccactcatcaaatccgtgcttcagggggtggaactggggcctgtgacccagatgcctctgtgcccactcgccctggcccccaggccag

SEQ ID NO: 8175 - DNA, 568 bp, Homo sapiens
gaagaagatgggcatcaaggcttcaaacacagcagaggtgttctttgatggagtacgggtgccatcggagaacgtgctgggtgaggttgggagtggcttcaaggttgccatgcacatcctcaacaatggaaggtttggcatggctgcggccctggcaggtaccatgagaggcatcattgctaaggcggtagatcatgccactaatcgtacccagtttggggagaaaattcacaactttgggctgatccaggagaagctggcacggatggttatgctgcagtatgtaactgagtccatggcttacatggtgagtgctaacatggaccagggagccacggacttccagatagaggccgccatcagcaaaatctttggctcggaggcagcctggaaggtgacagatgaatgcatccaaatcatggggggtatgggcttcatgaaggaacctggagtagagcgtgtgctccgagatcttcgcatcttccggatctttgaggggacaaatgacattcttcggctgtttgtggctctgcagggctgtatggacaaaggaaaggagctctctggg

SEQ ID NO: 8176 - DNA, 554 bp, Homo sapiens
  unsure (522): n=A,T,C or G
ccatttacaaatatgtttaatagcagcatttctttaaagaaaaacaaagttcaaatgcccaataataattatgtttaacacttggtacacatataaatagacaaaaggctgcggagaacactggatttaaataaaggtgttatgggtataattaactataatttattttatgaataaataagaaaaaagtccctggctataaaggatagtggaggtttatttcccaatattcttccatttggactgaacccctgccaactaagcagacatcccactattacaccaaaaagactgctctccccgcgagcaattacaatacatgacaccactaggcccaatggctcagagggaagagtggcctgtggctcttcaatctttatccaaacctggttctagcttcaggagcctttggtcacctgagactttttatttattaatttttatgagacggagtattgctatgttgcccaggctgattctgaactcctgggctcaagcagttctcccgcctgggcctcccanaatgttgggattacaggcatgagccaccacac

SEQ ID NO: 8177 - DNA, 262 bp, Homo sapiens
cctcaagtaatccatctacctcggcctcccaaaggattgggactactgatgtgaggtgtatttgtcactattcatctaactgcatacacattatctgtgcacttactgtatataaattatacctcaataaaaagtttatttacttctttatattaaatgtctattaataagctgggcgcagtggctcacacctgtaatcctagcactttgggaggccatggcgggcagatcacttggggccagaagtttgagaccagcctgg

SEQ ID NO: 8178 - DNA, 569 bp, Homo sapiens
  unsure (208): n=A,T,C or G
  unsure (466): n=A,T,C or G
cggctaactatggcgaccgccacggagcagtgggttctggtggagatggtacaggcgctttacgaggctcctgcttaccatcttattttggaagggattctgatcctctggataatcagacttcttttctctaagacttacaaattacaagaacgatctgatcttacagtcaaggaaaaagaagaactgattgaagagtggcaaccanaacctcttgttcctcctgtcccaaaagaccatcctgctctcaactacaacatcgtttcaggccctccaagccacaaaactgtggtgaatggaaaagaatgtataaacttcgcctcatttaattttcttggattgttggataaccctagggttaaggcagcagctttagcatctctaaagaagtatggcgtggggacttgtggacccagaggattttatggcacatttgatgttcatttggatttggaagaccgcctgncaaaatttatgaagacagaagaagccattatatactcatatggatttgccaccatagccagtgctattcctgcttactctaaaagaggggacattgtttttgt

SEQ ID NO: 8179 - DNA, 241 bp, Homo sapiens
ctgtgatattgtgaaatatatagttggtcttcaactcccttcctggcatacaactcctaaaatctttggcctttccaaagtggtgtcattttgtatgctaatgattggtggctggcgcacttaggtagcttcagggtaggggctggtcactgaaaaaccaagggaggattagaaggttaggactttctgtcccatctcccaacctccaaggagggcagagaggctgactgatttccaatgg

SEQ ID NO: 8180 - DNA, 175 bp, Homo sapiens
ccagtgatggactgctgggaaatctgctggcctgtggtctgagttcccctacttgctcaggctgcccctcactcccagtgtgccagggaggcttagtccggggagcatcagagcagaagacattcggggctcatggctcccatccccactggcctgtatcttcagcaccctctgg

SEQ ID NO: 8181 - DNA, 545 bp, Homo sapiens
ggaatttcgcagagctgaagatcaagcgcctgagaaagaagtttgcccaaaagatgcttcgaaaggcaaggaggaagcttatctatgaaaaagcaaagcactatcacaaggaatataggcagatgtacagaactgaaattcgaatggcgaggatggcaagaaaagctggcaacttctatgtacctgcagaacccaaattggcgtttgtcatcagaatcagaggtatcaatggagtgagcccaaaggttcgaaaggtgttgcagcttcttcgccttcgtcaaatcttcaatggaacctttgtgaagctcaacaaggcttcgattaacatgctgaggattgtagagccatatattgcatgggggtaccccaatctgaagtcagtaaatgaactaatctacaagcgtggttatggcaaaatcaataagaagcgaattgctttgacagataacgctttgattgctcgatctcttggtaaatacggcatcatctgcatggaggatttgattcatgagatctatactgttgggaaaacgcttcaaagaggc

SEQ ID NO: 8182 - DNA, 593 bp, Homo sapiens
ctgccaggagccagttgctctggcctcagtctccaattgttagtctcaggatcaacagagaactggaaagcagcagaatctggaggagcaggaagagagcccagagggagtgttgtgctgagtgacggttaacagatgaaacagaatttcatggagattctttgttacaaggagaaattgctcagtctcaactcccaaaacgtgaaagttgcctggtttaagagacctatgttttctttttcagctcttcaaacctccgggaaagatcatcaaagtcaatgtcttcagatgctgaggtgctggcaccagcagatgcagttggtagtgtgtctggcacagatggcaactctggtaggacaaagttgtcatagttatctgcaggtctggaaggaagctttgcagaggcttctggcttgggtccaggaccaacaatctgtgcagaagagatattcttatcagcattaatgtcatctacctgaaacacaaagattgttaccagaggagacagcaatagtgtcactggagaaagtactggtgtaagcccctgtgtttccaaaagttaagttgctcaccaaatgcaacagagcctgttc

SEQ ID NO: 8183 - DNA, 357 bp, Homo sapiens
ccacatcaatgtcatacagcttcttcacagcctgtttaatctggtgcttgttggctttaacatccacaatgaacacaagtgtgttgttgtcttctatcttcttcatggcagactcagtggtcagcggaaacttgatgatagcatagtggtcaagcttgtttctcctgggagcgctcttccgaggatatttgggctgtctccggagtcgcagtgtcttcggccgccggaaggtgggtgacgtgcggatcttcttctttttgtggctgtggacacctttcaacactgccttcttggcctttaaagccttcgctttggcttcagctttaggaggggcaggagcttccttcttcgctttcg

SEQ ID NO: 8184 - DNA, 595 bp, Homo sapiens
ccaatatgcctttggagcacagcctatggtttatgtttcttttatgaccacctttaatatctgtcaaacgactagacatgctatagctttacccgaaggtaatttgattgactgtgctctgctagaagatggtgtatgggtccctctcgaggtaactgccaataaatgataagtggtatttgttttagataatgcctctacctcagtggtagctttgataatggcaaattgtaattgcaagtgccattttcagaataggcattggtttattttaggaagaggataataaagttccttttagttatcaaagtaacaccttttattgttaaatctcaacttttgaagaaaacactttcaatttcttaactttttcctcagggttagtgagttagtacaactacccaaagaagtgttaaaatattgagattctatatgtgtgtgtttatatgtgcatctatgtattacgtatacaaaatatttcacctcaaaggactttttgaaaaggtaatctttggtctatagtacagtgttaagctcactgataatttagaatcattaagttcgtttattttcttaacactacagaaaggaaagg

SEQ ID NO: 8185 - DNA, 514 bp, Homo sapiens
  unsure (403): n=A,T,C or G
ccaggatggcatcagtggcaaacacattcccctgagtttttgccagcttgcggatgacagggtcgtctgtggtggtgacagtgtggaagatgcgcttgatgctccgcagtggcttctcactcctcgtggtgatgcggtcaaaggctttgtcgtagtattctagggccccacaacactcaatgtcctgtggctctgatacttccaagtagcgcatcttcatcaactgaggaaaatccatttcctctttcacttcccaatcactacgaacttcaactgaagagtctcggggtttctgtgatttctgatcccatttctgcctaaccccaaattgtttctggaactttttctgcagtcgaatgcgttctctctctttctgtttggcactcttaggcaggatctgcangttgaactgcaacatgttccgacgatctttgtctctgcggaggttcctctgggcaaatctcattcgattccgctggtaggccgtcttctgtgtgcgcgctgtatccaccag

SEQ ID NO: 8186 - DNA, 601 bp, Homo sapiens
  unsure (593): n=A,T,C or G
gttatttccaccatctggttttccaatgctagtcactgacatcaagccaagactgagaaaatttgcccacatctctggaggtacaaccaccccatatttgggtcagtcctgatctctgatgccttcttcccctttctccactgacctttcagagaggttaaatggatttgacagagaaagcatacagactgttcaaaaatggaagatcatctactaagattatatccatctctaagactttacatgtttatgatttcactaactatgcatcccaattttgtgaatatatttttaaagaaacatttatatctatatcaattactaaaagccaacatttattggagctctttaattgtattaaaatttattatccatgataatgcaatacaactgatactgtttttagtttaatatgtgtagttaacgaacctcagaggggttaacttgcctgctgtcacacaatggaaacctcaatttgaaagtttgccctaagccactaaactatgctacttatcccttcagcacatacatgacatccttatttactcatctaaaagttatggttagagttgagaggtagtgttataatccanaaagagca

SEQ ID NO: 8187 - DNA, 361 bp, Homo sapiens
ccaagcatctaagaatataatccagccaccctcctgtgttttgcattattataatgttccattgtgtgtcacagaagagaccttcacaaagttgtgtaatgaccatgaagttcttacattcatcaaatataaagtgtttgatgcaaaaccttcagccaaaacactttctgggctattagaatgggagtccaaaactgatgcagtagaagcccttacggcactgaatcactatcagataagagtgccgaatggttccaatccctatacattgaagctttgcttttctacatcatcccatttataagaagagaagagcatgttagaatttatgttcacctttattacaaatgggatgatgtag

SEQ ID NO: 8188 - DNA, 363 bp, Homo sapiens
cctggcatacccccatcctctacactcatacccacacaagaccctgggtggctaaggggcagcagggattgcaacacgtttggggaaaatcaagttatggagccagctcccaggaaggagaagccgtggaacattgccagagagaatactgaggatcagaggcatctaccaactccacagtcagggcttgaagagtaaggggctggtggtccttgaagccacagtcttggggcgagtcccatggagctaggaaggggaagaaggaatccagggtgcaggctgaggaactactgtccacaatctgcaggaagggaggcaaggatgaaggtggcaggaaagttggagatagcaaatggatgacag

SEQ ID NO: 8189 - DNA, 387 bp, Homo sapiens
ccatcggtgctgaaattgagcattttaaatagtacagtaggctggtatacattaggaaatggactgcactggaggcaaatagaaaactaaagaaattagataggctggaaatgcttactttctgctctcattttctttcattttgtctgctgtctttttgaatgccaatactttcatttaaaatgttttgggagcacggcaacccaaaatgactgaacggtggtccaaaaatccaaaccaactgataattacttctcgaggtgataggaaaggcacaggaagttaggactttggctgaaatgatgaaaacacatgttcgccattttagggatcagcgcctcgactcctgccacctccggctccaacgatgatcagcaaaggacaatt

SEQ ID NO: 8190 - DNA, 537 bp, Homo sapiens
  unsure (406): n=A,T,C or G
caaatagcaaaattgaggccaagggccaagagaatatccgaactttaatttcaggaattgaatgggtttgctagaatgtgatatttgaagcatcacataaaaatgatgggacaataaattttgccataaagtcaaatttagctggaaatcctggatttttttctgttaaatctggcaaccctagtctgctagccaggatccacaagtccttgttccactgtgccttggtttctcctttatttctaagtggaaaaagtattagccaccatcttacctcacagtgatgttgtgaggacatgtggaagcactttaagttttttcatcataacataaattattttcaagtgtaacttattaacctatttattatttatgtatttatttaagcatcaaatatttgtgcaangaatttggaaaaatagaagatgaatcattgattgaatagttataaagatgttatagtaaatttattttattttagatattaaatgatgttttattagataaatttcaatcagggtttttagattaaacaaa

SEQ ID NO: 8191 - DNA, 599 bp, Homo sapiens
ctgatcttaaactcctgacctcaagcagtctacccccgttggcctcccaaagtgctgggattacaggtgtgagccactgcacccagccaagtttatgtatttttattctttttcatgaatgtgatttgttaaatgagtgattaaatataatttttatatatttgtatgacttttctgtaaataaaatttaaaatcagaaaaaatcatgttagaccatgtatagtgatttattttgaaattttgattatttaatatgtacaccatgctctgttcttccccacaataaaaaaattcaatgctttgtcttctttaaaatataccatataaatagcatcagtaatagtaaatatcgaggaatgactctaataaaatatgtacagtacttctgcatggaattctataaaacattattgagagaaactaaagaagacccaaataattggagcattatataatgttcatgtattgaaagaatcaatattataaacatacatgttttctccaaatctatagatcccaatttaatcccaatcaaaatcttaataacagcattattaaaaataacattattgagatataattcacatatcttaaaattc

SEQ ID NO: 8192 - DNA, 301 bp, Homo sapiens
  unsure (265): n=A,T,C or G
atgtaaataagatgatttaatgttgattttaatcctgtatataaaataaaaagtcacaatgagtttgggcatatttaatgatgattatggagccttagaggtctttaatcattggttcggctgcttttatgtagtttaggctggaaatggtttcacttgctctttgactgtcagcaagactgaagatggcttttcctggacagctagaaaacacaaaatcttgtaggtcattgcacctatctcagccataggtgcagtttgcttnctacatgatgctaaaggctgcgaatgggatcctgat

SEQ ID NO: 8193 - DNA, 563 bp, Homo sapiens
ctggcaatgacaagactgggagtatcaaactaggattgttagttcaattaaaatttcagataaacaataatgtacttatactaaaaaattatttgttgtttatctgaaatgaaaatttaactgggtacccaattgtttgtttgtttaatctaaaaaccctgattgaaatttatctaataaaacatcatttaatatctaaaataaaataaatttactataacatctttataactattcaatcaatgattcatcttctatttttccaaattcttgcacaaatatttgatgcttaaataaatacataaataataaataggttaataagttacacttgaaaataatttatgttatgatgaaaaaacttaaagtgcttccacatgtcctcacaacatcactgtgaggtaagatggtggctaatactttttccacttagaaataaaggagaaaccaaggcacagtggaacaaggacttgtggatcctggctagcagactagggttgccagatttaacagaaaaaaatccaggatttccagctaaatttgactttatggcaaaatttatt

SEQ ID NO: 8194 - DNA, 571 bp, Homo sapiens
  unsure (545): n=A,T,C or G
gtttaacggccgcggtaccctaaccgtgcaaaggtagcataatcacttgttccttaattagggacctgtatgaatggctccacgagggttcagcctgtttgattgtagctatgttggtgtatctcgtgtacaagatggaaaagtgcttttgttgttctacctgatccagttgggggagcaggaatagggggtgcctgcctaacggcctctagcccatgtgcttatactgggatctgtcccgagggatctgcacctggttggcagtcattttgtggtggatgtggtaaatcgcgagtgttaccatgatgacgaggcccaagatgagccccaaaatcaggggcaaggtttcttccagttgctcccgctcatccactgggcatttatgctcttcactgaagacaaaatctgagataatgtcaaaaggttggatgtggaccgcagacaggatcatggtgaccgtcttctgcggatcactagaggccagtgaaatggtttgttgagcttgacactcataggacttcccagcgggggtgaccaaggcaganaggtggtgcgagttggctgtgtgctt

SEQ ID NO: 8195 - DNA, 511 bp, Homo sapiens
  unsure (18): n=A,T,C or G
  unsure (87): n=A,T,C or G
  unsure (161): n=A,T,C or G
  unsure (163): n=A,T,C or G
  unsure (204): n=A,T,C or G
  unsure (279): n=A,T,C or G
  unsure (280): n=A,T,C or G
  unsure (304): n=A,T,C or G
  unsure (347): n=A,T,C or G
  unsure (390): n=A,T,C or G
  unsure (464): n=A,T,C or G
atttcaagaacactgaanaatggaaagtgggcattaactgaagcagacacctcttgaggtaagatttgtggaagaagaggttaaagngtgccagaaatttgggttaccctcctctagaaagaaattccagtaatggatctgtttaagtgttaagggagcanangagaagacggtgaatgtacttcaatattttgaacatttttngaaataggaattcttgagtctcttttctttcttcagtcttttccatttctttttcttttctttttcactgtaatnntctgtgtttctgatactgtgctgntttagataatattatgtttacatctttcatcccactccttatnccttcaaaggtctgaggaaaaaaaacctgtcccctggtgcggnggaatcggatgtgagaggaataactggggttgatctatttggaactacagatgcagtggtgaagcatgtactanagggtcacgatcgtggagtaaactgggctgccttccaccccactatg

SEQ ID NO: 8196 - DNA, 563 bp, Homo sapiens
  unsure (520): n=A,T,C or G
ccagtggaatgatgttccctgcaattaccatctcacctatacgtgcaagaaaggaacagttgcttgcggccagccccctgttgtagaaaatgccaagacctttggaaagatgaaacctcgttatgaaatcaactccctgattagataccactgcaaagatggtttcattcaacgtcaccttccaactatccggtgcttaggaaatggaagatgggctatacctaaaattacctgcatgaaccgtaagtggtcctttagaaagaatggactaccgtgctataacaactactagacaccttcattttacggctgtggtatcggcagtttagggtatggagcaagtaatattgtgtgttttctttttttctttctttccttccatgtagcatctgcataccaaaggacttattctatgaaatactttaaaaattcctcatcagcaaaggacaattcaataaatacatccaaacatgatcatcgttggagccggaggtggcaggagtcgaggcgctgatccctnaaatggcgaacatgtgttttcatcatttcagccaaagtcctaa

SEQ ID NO: 8197 - DNA, 562 bp, Homo sapiens
  unsure (509): n=A,T,C or G
  unsure (553): n=A,T,C or G
  unsure (558): n=A,T,C or G
ccttcttgtgatcttgctctatctcacagcacactcagcacccccttctctgcccattccccagcctctcttcctatcccatcccatcccatcccatcccatcccatcccgctcttttcctacttttccttccctcaaagcttccattccacatccggaggagaagaaggaaatgaatttctctacagatgtcccattttcagactgctttaaaaaaaatccttctaatctgctatgcttgaatgccacgcggtacaaaggaaaaagtatcatggaaatattatgcaaattcccagatttgaagacaaaaatactctaattctaaccagagcaagcttttttattttttatacaggggaatattttattcaaggtaaaattctaaataaaatataattgttttttatcttttctacagcaaatttataattttaagattccttttcttgtttatcagcagttgttattacatccttgtggcacatttttttttttaattttgtaaaggngaaaaaagcttttatgagctcatgtagcaatcagattttcctgnggatngata

SEQ ID NO: 8198 - DNA, 547 bp, Homo sapiens
  unsure (341): n=A,T,C or G
  unsure (503): n=A,T,C or G
tttttttttggaaattggagataaaatttttattacttgtaaacaaaattctgtcaaaaacctgacaaattaaacaatacaattaatatgtttaatagaactaattacatatgagaggcatccaaaatccatttttctatacaaacatggtttgatatacagtcattttatctgtgtattaattggtttatgaaataacaaatagaaaaatcaagtatgcattatcaagttaaagaagcaggagagatggagctataaaaacaaagagagaagaatgttgtaaggagggcttaacaaccaggataaatgttgtagagagatcaattaaagtgatggcctanagatcacgggcttcctttggcagagccatgttggtgaagtgaaggaagtggaagccagaccacaatggttgaagaatgaatgtaatgtaagagccaagacatttatttgagtctgatagtaatgaaaaaggacaagaattttcttcttgctgttgtttttgncatttcatgttcaaaaccctttatctcccatgtggtactgaaaa

SEQ ID NO: 8199 - DNA, 592 bp, Homo sapiens
  unsure (110): n=A,T,C or G
  unsure (131): n=A,T,C or G
  unsure (153): n=A,T,C or G
  unsure (548): n=A,T,C or G
ggcagatagtgagcgctggtggcggagttaaagtcaaagcaggagagtaattatgaatagcgcagcgggattctcacacctagaccgtcgcgagcgggttctcaagttangggagagtttcgagaagcagncgcgctgcgccttccacactgngcgctatgacttcaaacctgcttctattgacacttcttctgaaggataccttgaggttggtgaaggtgaacaggtgaccataactctgccaaatatagaaggttcaactccaccagtaactgttttcaaaggttcaaaaaaaccttacttaaaagaatgcattttgattattaaccatgatactggagaatgtcggctagaaaaactcagcagcaacatcactgtaaaaaaaacaagagttgaaggaagcagtaaaattcagtatcgtaaagaacaacagcaacaacaaatgtggaattcagccaggactcccaatcttgtaaaacattctccatctgaagataagatgtccccagcatctccaatagatgatatcgaaagagaactgaaggcangaagctagtctaatggaccagatgagtagttgtgatagttcatc

SEQ ID NO: 8200 - DNA, 542 bp, Homo sapiens
ccaccttttaaacataagttaattacttgctgacataatatgaaaccttactttaaatacaatagtttcaaagaaaaatggtgttacaatataaaaccacaacaaaaggtgtgcaaagagacatttatattggctataaaaggcagtgagaggaaagggcaaagcagtttagaaaataattcctgcaatcactatttacagttctggtttgagctttgtttgaattccacttgaaaaaataactcccttcaaccaactgactcagggggatggatggaaaagaacagagtaggtgaaatttgcaacaaactgactctaagaaggctctcaccttagagatattaacttggatcaggcgcatctttctctgtgattgcatattgaaggagtgctgtctaaagcccttgatcctctgtctctcttccttcactcagtgcattggtgcagcaattttgtttattcccgtttccaaatgccacacccttctgtgagcagagaaatccatgactcaagaatggtatctttgtaaactccatcttttc

SEQ ID NO: 8201 - DNA, 589 bp, Homo sapiens
ccaaggcttccagggtctggtgcagggacgaagaggaacacagtgccccaaacactgggatgctctccactgctgctcccttgggggaaccatccagaaccatacccggtggactgcagcttgagaagaggtgggggtaaggaggagccaccctgcagggagtcagcagcagatgggaagaactcatgactccaggctgctgctgttgtaaatactgagccaagatttcttccccagtggtacatgcatgaagggcagagggtggaggtgtccctggggtgagctggcttgtgtggcatgctctgtctatacccctcagcaccactgactgggcaaagcaacgtgttccagaaggctccccacatgcagacagtggggtccatggggtggctcctccaaactgcatcagggaatcaggaagggactggcctggagccaaggggaaagggatgattgctcctgctgtcaccacctttttcccacagaagctcagcatgtcagccagatgaaccatggaaactggagaggaacacaggcgataaggaacagtgactgtgtccagggctgtagccaggatggcactgcagtg

SEQ ID NO: 8202 - DNA, 581 bp, Homo sapiens
  unsure (63): n=A,T,C or G
  unsure (65): n=A,T,C or G
  unsure (103): n=A,T,C or G
  unsure (149): n=A,T,C or G
  unsure (158): n=A,T,C or G
  unsure (239): n=A,T,C or G
  unsure (319): n=A,T,C or G
  unsure (326): n=A,T,C or G
  unsure (348): n=A,T,C or G
  unsure (367): n=A,T,C or G
  unsure (383): n=A,T,C or G
  unsure (413): n=A,T,C or G
  unsure (428): n=A,T,C or G
  unsure (433): n=A,T,C or G
  unsure (470): n=A,T,C or G
  unsure (501): n=A,T,C or G
  unsure (515): n=A,T,C or G
  unsure (540): n=A,T,C or G
  unsure (545): n=A,T,C or G
  unsure (561): n=A,T,C or G
  unsure (568): n=A,T,C or G
  unsure (576): n=A,T,C or G
gtacaagcttttttttttttttttttttttttttttttgggattatttactaaataattgatntncatccaacatcactgaatggaaataatttaaaaataancaaggcttaaattggggtctttcaaaaaactcaaaacattcttggngactgtatntttaacaaatggaatgacaaaactagttaagtcatattatctcaatcaactccaaaactcaatgttgccaacatgtttttntacttaaaagcaaacaaaaagcaaagcctcataatttagtaattaccatgtttcttggtttctgttctcaaatgccacanaaagatncctgatgaaaggaagcaaagcncctagtctcatcagtcttnttcaaaactttaaggntgctttcacaatctcactataaatatttanattcctatctgacanatttnttcacttatgtgagtaggaatgctctcgaaaccttantctttactcttgcttcatactaaagctgttngattaaaccacctntgtatttgctggcctgcaacactanataanaactcattcctatctnttccaanaaaccaanataat

SEQ ID NO: 8203 - DNA, 586 bp, Homo sapiens
  unsure (385): n=A,T,C or G
  unsure (466): n=A,T,C or G
  unsure (553): n=A,T,C or G
  unsure (572): n=A,T,C or G
  unsure (577): n=A,T,C or G
ctgtgagcaaaaggagaagtatcagcttctcaagggcctagggtttgttggaagggcaaggcaggggcaaaggaggatacagaacaagggggcaagtaccagtgcctgggatggacccatccattcaggcagggggtgtggggtgtcccctgtgcttagaaaccacctagcatcatagctgcaacagcactttattgggatctgagtctacagttcacatagggaggtgaagccgtgggagaagcaggggtaaaaaaaaaaaaaaaaaaaaaaaaaaaaaggggggagggctgttgtgttggtgcagggggggtccatgcgcactttatcccctgagcgtagcagtgcctgatgccacatccgcttgagtggcaggcgagtgaanatgttgcccaaatcctggaccacaacagtgtccttctcatacctaaaatggctgggcacccctccagcacacggggcatanagattgtagatgttgaggccagagttgcccacgatgcgggccacttcctgaagattggtcacgcattccaggtctttgttgtcatanaagttacacttgttttganagcancagtgggtc

SEQ ID NO: 8204 - DNA, 610 bp, Homo sapiens
  unsure (604): n=A,T,C or G
ccagggccatccaaaacattgagatgacccaagaggatgtccgactcattggtctcagtgccaccctacccaactatgaagatgtagccacctttctacgtgttgaccctgccaagggtctcttttactttgacaacagcttccgtccagtgcctctggaacagacatatgtgggtatcacagagaaaaaagctatcaagcgtttccagatcatgaatgaaatcgtctatgaaaaaatcatggaacatgctggaaaaaatcaggtgctggtgtttgtccactcccggaaggagactggaaagacagccagggccatccgggacatgtgcctagaaaaggacactctgggtctgtttctgagggagggctcagcctccacagaagtcctgcgaacagaagctgagcagtgcaagaacctagagctgaaggatcttctgccttatggctttgctattcatcacgcaggcatgaccagggttgaccgaacactcgtggaggatctttttgctgataaacatattcaggttttagtttccacagcaactctagcttggggtgtgaatctccctgcacatacagtcatcatcaaaggcacccaggtgtncagtcc

SEQ ID NO: 8205 - DNA, 516 bp, Homo sapiens
  unsure (510): n=A,T,C or G
ccaagaattcaaggacttgtaggagataagtgaaggctattacagggattttgtcctggtttggtaggtttctcttggagaaataccactacaccctggtctagaaatgagttttgaagacttggggagttaaagggcactgagttttgctctcaccgtaccctgattccaggttttacatggagaaataacctgagggactttatttctatccaatgccctggtttccatcctgaccagaggatgatgacatccgctgataggccatgcttctgtcttctcttatgtgcctcatgccaagcctcgaaatataccttctggaccatcatttccacatctaccttgtgactagaagtcctagttatggtattttgaaatttatgatccataatccttgccagaaatcctgcagcgaaccatggcatggcatcatcctagtcattgatttcaatcttttgccttttgctcccctggaatcttgggccaattgcaggagggggctctgtttgnctctct

SEQ ID NO: 8206 - DNA, 414 bp, Homo sapiens
  unsure (172): n=A,T,C or G
  unsure (180): n=A,T,C or G
  unsure (200): n=A,T,C or G
  unsure (202): n=A,T,C or G
  unsure (238): n=A,T,C or G
  unsure (242): n=A,T,C or G
  unsure (259): n=A,T,C or G
  unsure (260): n=A,T,C or G
  unsure (297): n=A,T,C or G
  unsure (299): n=A,T,C or G
  unsure (326): n=A,T,C or G
  unsure (341): n=A,T,C or G
  unsure (348): n=A,T,C or G
  unsure (374): n=A,T,C or G
  unsure (376): n=A,T,C or G
  unsure (377): n=A,T,C or G
  unsure (384): n=A,T,C or G
  unsure (394): n=A,T,C or G
  unsure (404): n=A,T,C or G
  unsure (406): n=A,T,C or G
ctgttttaagtgtattaacgcattttggtaaatttacagacttgttcaaccacaaccacagtctgattttagaacatttccatcaacttcaaagatccctggtgccatttgtagtcctccaacccatctccgatctatcttgtttctatgacttgccttttctggctatttnatataaangggatcatatgacatgtggntncctatatctgacttttttcatttagcataacgtttntgangctcatccatgttgtannactccatgccatgttgtgggctacataatattccatngnatggatataccacattttgcttatcanttaatggacatttangttttgnctactttttggcattaatagtgctgntnngaacaancatgtataantctttgtatnanagccactt

SEQ ID NO: 8207 - DNA, 606 bp, Homo sapiens
  unsure (568): n=A,T,C or G
ctgaacagagaaaggaattaaaacgctttaattaaaaaatcacgagtggatgataaagtgtgtagaaactgaaaatttacaaactatttaaaacctggaatcgctgactgttcagaaactacacagatggatcatgggtggtggtgaacagcagaaagggattatggatgaatctgcattgttctagctgctccccatgccacccgtctccgaggaaagcctgacattgattagatattgagccaggctaatgctggcagcagatccagtgatggtaacctgcctatcagtagatccttccactgggttcgcaattttgatctgcgccccagacatctgacggatctcattgattttggcgccttgacgcccgattatgcagccaatcaaatcgtttggaatggtgagttcatgagaagtagtctgagcagatgcatccaaacctgcccaatagcctttcacctctggagagctggattcaatgccactgaatccggtgttgccatgcgtcatgggaaaatgagactgttgcattgccaactggtgcagcttggtcaaatctggctgnggaatggcatactgtccttgaatggtataggacctgcc

SEQ ID NO: 8208 - DNA, 392 bp, Homo sapiens
ctggcagatgcagaagaagcgatgtatcagaatgtggatggccgtgtttcggaatgtcctcacacctaccaaaacaggcgacctttcagcagagagatggatttggggctactctctccgcaggctcaggtcgaagattcgtagaggaacaatttagttttaaggacttcatccctccacctatccctaacaggctgtagattaccaaaacaagattaatttcatcactaaaagaaaatctattatcaactgctgcttcaccagacttttctctagaagctgtctgcgtttactcttgttttcaaagggacttttgtaaaatcaaatcatcctgttacaaggcaggaggagctgataatgaactttattggagcattgatctgcatccaagg

SEQ ID NO: 8209 - DNA, 390 bp, Homo sapiens
gcagaaaccagggtggttatgaccgctactcaggaggaaattacagagacaattatgacaactgaaatgagacatgcacataatatagatacacaaggaataatttctgatccaggatcgtccttccaaatggctgtatttataaaggtttttggagctgcactgaagcatcttattttatagtatatcaaccttttgtttttaaattgacctgccaaggtagctgaagaccttttagacagttccatctttttttttaaattttttctgcctatttaaagacaaattatgggacgtttgtagaacctgagtatttttctttttaccagttttttagtttgagctcttaggtttattggagctagcaataattggttctggcaagtttgg

SEQ ID NO: 8210 - DNA, 123 bp, Homo sapiens
  unsure (31): n=A,T,C or G
  unsure (37): n=A,T,C or G
  unsure (75): n=A,T,C or G
  unsure (97): n=A,T,C or G
cccgcctcagcctcccaaagtgctgggagtncaggtntgagccactgcgcccagccagggatttcttttttaagngaaaaataaaaagatcactatntagacacatgtggctggaatgtggga

SEQ ID NO: 8211 - DNA, 293 bp, Homo sapiens
tcgactcacagatggatgacatggacatggacttagacaaggaatttctccgggacttgaaggagctcaaggtgctagtggctgacaaggaccttctggacctgcacaagagcctggtgtgcactgctctccggggaaagctgggcgtcttctctgagatggaagccaacttcaagaacctgtcccgggggctggtgaacgtggccgccaagctgacccacaataaagatgtcagagacctgtttgtggacctcgtggagaagtttgtggaaccctgccgctccgaccactgg

SEQ ID NO: 8212 - DNA, 501 bp, Homo sapiens
ggacgtgctcttcagaagcattagtgaaagggacccttacctcgtgtcctatcttagacagcagaatttgtaaaatgagtcagttaggtagtctggaagagagaatccagcgttctcattggaaatggataaacagaaatgtgatcattgatttcagtgttcaagacagaagaagactgggtaacatctatcacacaggctttcaggacagacttgtaacctggcatgtacctattgactgtatcctcatgcattttcctcaagaatgtctgaagaaggtagtaatattccttttaaattttttccaaccattgcttgatatatcactattttatccattgacatgattcttgaagacccaggataaaggacatccggataggtgtgtttatgaaggatggggcctggaaaggcaacttttcctgattaatgtgaaaaataattcctatggacactccgtttgaagtatcaccttctcataactaaaagcagaaaagctaa

SEQ ID NO: 8213 - DNA, 50 bp, Homo sapiens
  unsure (15): n=A,T,C or G
  unsure (19): n=A,T,C or G
  unsure (30): n=A,T,C or G
  unsure (37): n=A,T,C or G
  unsure (44): n=A,T,C or G
ttttttttttttttngctngcctgattttnattattnaaaaaantggaaa

SEQ ID NO: 8214 - DNA, 304 bp, Homo sapiens
  unsure (20): n=A,T,C or G
  unsure (21): n=A,T,C or G
tatgtatttatttaagcatnnaatatttgtgcaagaatttggaaaaatagaagatgaatcattgattgaatagttataaagatgttatagtaaatttattttattttagatattaaatgatgttttattagataaatttcaatcagggtttttagattaaacaaacaaacaattgggtacccagttaaattttcatttcagataaacaacaaataattttttagtataagtacattattgtttatctgaaattttaattgaactaacaatcctagtttgatactcccagtcttgtcattgccag

SEQ ID NO: 8215 - DNA, 535 bp, Homo sapiens
ccactagctgaatcttgacatggaaggttttagctaatgccaagtggagatgcagaaaatgctaagttgacttaggggctgtgcacaggaactaaaaggcaggaaagtactaaatattgctgagagcatccaccccaggaaggactttaccttccaggagctccaaactggcaccacccccagtgctcacatggctgactttatcctccgtgttccatttggcacagcaagtggcagtgtctccaccacctgttgaatgaaagccaggtaaaaagggaaaagagagaaaagaaaaaaaagggattggcaccaaaactgtaaggcagtgtgctccccaacccaaaaggtagctgataaacccccaactctatcttaccaagaggctcctctgtaaattacctacctgtttacctcttaacatttacccagaataaagagacatagaagaagttctccattccaccttcctctgatcagaattctgccagcttatatgggtattagctttgtataggaccgcttacctatgatggtg

SEQ ID NO: 8216 - DNA, 602 bp, Homo sapiens
  unsure (554): n=A,T,C or G
actggataataagccatggggattgtggaacctaaaggcccaacagccacagactgggccatgggaagatacagagaggctccaggaaatgcggctgacatggtggggactgtggcagcccctgggtgcacaaagctcggacgatagagctagaagaggcagaagagaaggcaaaatgttactttatgacattcctatttgagatctctttaatgagctaattcttaattctccttatgcaggttatactttttgtaagattatacaagttgcctttccactggccttcaatattctcctggatcactttctgctatagctaatgttgggctcacagaacgcaaattcatcttctgcaccttagcctgtgccaaataacacaaaatcatcaaataatgcactttcaactccgacaaaaattgccaaattatatagtgttttagattattcatgttagcatttgtgaagagtaaatatgtgaagtcagatttagctaaggactaaaggaccaccctaagagtattcccagctagttcaaatctggcaaactggangcacctctgagtaggcaggtggagcatcggtatagggtggagcctgag

SEQ ID NO: 8217 - DNA, 527 bp, Homo sapiens
  unsure (415): n=A,T,C or G
  unsure (428): n=A,T,C or G
  unsure (438): n=A,T,C or G
ctggtttttaattctaatagtataaaaattggaaatttgaaatagttctgtaaaagaaaaaaatgtaaaaatacatctgctttctctcatggtttaatacagcattggaaggctttcagatgttttcttaaaaaaaaacaaaacccaaaaaaactcaacatttaaaaccaaatctcagcttcatttccagaaatattgcagtttggtttaggtaatgtttcatttaatctactccagtttccacaaaatggcattttattaaaaaaacctttcagttatttggtccttttgcaatttgctgtgcacataatgcctactgtaccaaacttttattgcctttaaatttagttgtaattttattgataaaatttaaatctagtgtctttatttcttctgttacaatagtgttgcttgngtaagcaggttanagtgcacagngtccccaattgttcctggcactgcaaaaccaaattaaacaattccacaaagaattctgacatcaatgtgttttcctcagtcaggtctat

SEQ ID NO: 8218 - DNA, 495 bp, Homo sapiens
cctaagttaagaatgctacagaaaaatatcgatccctaagcgtatttactgttatgtgaatgtgtgtgtcaaaggacttaggtgctttgggggagaggagggtgaagacaggaatttattcattgagcgaatagttattaagcgcccactctattccagacaccgttctaggcattaggtgaacagcagtgaacaaaacagacggaaatctgtgtctacttgtagctcacattttagagaggaaggcacatactaagcaaagtaattagaaacatactgtattttaggtcgtgatagtcctgaagagaaacgtaaagcagggaagaagggtataaagtgacacaggaaggtcttgctgaaaagatgacttttaagtaaagggctgacagaagtgggagatttaaccacgcgaatatcttgggaaagtgcagtcagacagagggaccagccattgcagaggtcatgaagcagaaacgtgctagaatagcaaggagg

SEQ ID NO: 8219 - DNA, 607 bp, Homo sapiens
ggcaggtgtggtgccttggctaagtccacagacttctgagaggcccacgctttcttcttctccagaaataaaccctgaaactcaagcagctttaatcagagggcaggattccacgatagcagcatcagaacagcaagtggcagcgagaattcttgattccaatgatcaggcaacagtaaaccctgtggaatttaatactgaggttgcaacaccaccattttcccttctggagacttctaatgaaacagatttcctgattggcattaatgaagagtcagtggaaggcacggcaatctatttaccaggacctgatcgctgcaaaatgaacccgtgccttaacggaggcacctgttatcctactgaaacttcctacgtatgcacctgtgtgccaggatacagcggagaccagtgtgaacttgattttgatgaatgtcactctaatccctgtcgtaatggagccacttgtgttgatggttttaacacattcaggtgcctctgccttccaagttatgttggtgcactttgtgagcaagataccgagacatgtgactatggctggcacaaattccaagggcagtgctacaaatactttgcccatcgacgcaca

SEQ ID NO: 8220 - DNA, 572 bp, Homo sapiens
  unsure (150): n=A,T,C or G
  unsure (180): n=A,T,C or G
  unsure (181): n=A,T,C or G
  unsure (304): n=A,T,C or G
  unsure (335): n=A,T,C or G
  unsure (346): n=A,T,C or G
  unsure (431): n=A,T,C or G
  unsure (494): n=A,T,C or G
  unsure (496): n=A,T,C or G
  unsure (501): n=A,T,C or G
  unsure (531): n=A,T,C or G
  unsure (560): n=A,T,C or G
  unsure (564): n=A,T,C or G
  unsure (570): n=A,T,C or G
cctgaagatacattctattttgatcctgagtttactgcaaaaactcccaaagattcacctggcattccacctagtgctaatgcacatcagctttttcgggggtttagttttgttgctattacctcagatgatgaaagccaagctatgcanacagttggtgtacattcaattgttcagcannttacacaggaacagtattcagtttactgatggatatgaagtaaaagaagatattggagttggctcctactctgtttgcaagagatgtatacataaagctacaaacatggagtttgtagtgaanattattgataaaagcaagagagacccaacanaagaaattganattcttcttcgttatggacagcatccaaacattatcactctaaaggatgtatatgatgatggaaagtatgtgtatgtagtaacanaacttatgaaaggaggtgaattgctggataaaattcttagacaaaaatttttctctgaacganangccantgctgtcctgttcactataactaaaaccgntgaatatcttcacgcacaaggggtggttnatanagactnga

SEQ ID NO: 8221 - DNA, 536 bp, Homo sapiens
  unsure (459): n=A,T,C or G
ctggtttcagtgaaactgccaaaatcctcaagccaggaagtagaagccaaggagctgtcctttgttttggattacataaaccagtcacccaagtgcattgcctttggaaacgagggagtatatgttgctgcagtacgggaattttacttgtctgtttattttttcaaaaagaaaacaacatcaaggtttactttatcatcatcaagaaataagaagcatgctaaaaacaattttacgtgtgtatcatgtcacccaacggaagactgcatcgcatctggtcacatggatggcaaaattcgtctttggaggaatttttatgatgataagaaatatacgtacacatgtttacattggcaccatgatatggttatggatttggctttttcagtgacaggcaccagtctgctgagtggcggtcgtgaatctgtacttgtagagtggcgcgatgcaacagagaanaataaggagtttctcccgcgtttaggagctactattgaacatatctcagtctcgcctgcaggagatttattctgcac

SEQ ID NO: 8222 - DNA, 533 bp, Homo sapiens
  unsure (144): n=A,T,C or G
  unsure (383): n=A,T,C or G
  unsure (405): n=A,T,C or G
ccagtggaatgatgttccctgcaattaccatctcacctatacgtgcaagaaaggaacagttgcttgcggccagccccctgttgtagaaaatgccaagacctttggaaagatgaaacctcgttatgaaatcaactccctgattanataccactgcaaagatggtttcattcaacgtcaccttccaactatccggtgcttaggaaatggaagatgggctatacctaaaattacctgcatgaacccatctgcataccaaaggacttattctatgaaatactttaaaaattcctcatcagcaaaggacaattcaataaatacatccaaacatgatcatcgttggagccggaggtggcaggagtcgaggcgctgatccctaaaatggngaacatgtgttttcatcatttnagccaaagtcctaacttcctgtgcctttcctatcacctcgagaagtaattatcagttggtttggatttttggaccaccgttcagtcattttgggttgccgtgctcccaaaacattttaaatgaaagta

SEQ ID NO: 8223 - DNA, 477 bp, Homo sapiens
  unsure (23): n=A,T,C or G
  unsure (75): n=A,T,C or G
  unsure (304): n=A,T,C or G
  unsure (312): n=A,T,C or G
ccaacatggagaaaccccatctntactaaaaatacaaaattagccgggcgtggtgtcgggcgcatgtaatcccanctactcaggaggctgaggcaggagaatcgcttgaacctgggagacagaggttgcagtgagccgagatcacgccattgcactccagcctgggtgacaagggcaagactctctcaaaaaaaaaaaaaaaaaaaattttttttttgactctcctgagtatctgggccatgccttgcttttcaccggtgttatctttatcaaaggcacctaaaccggcagggtcagtcacgtnacccagancacttaatagttccgtggaaaagcctcgccggttccagaggcagcccttggcagacctgcccgggcggccgctcgattatggcccaaacccatgcaatgggccagttctttgaaaggaatagtgttccataactcacacaaggagaaatagaaaatttgaatagg

SEQ ID NO: 8224 - DNA, 545 bp, Homo sapiens
  unsure (419): n=A,T,C or G
ccttctgtccacgcccaccttacctgctgcttcccagaagaggaagcgggaagaggaaaaagactccagctcaaagtccaagaaaaagaaaatgatctctactacctcaaaggaaactaagaaagacacaaagctttactgtatctgtaaaacgccttatgatgaatctaagttctatattggctgtgatctttgtactaactggtatcatggagaatgtgttggcatcacagaaaaggaggctaagaaaatggatgtgtacatctgtaatgattgtaaacgggcacaagagggcagcagtgaggaattgtactgtatctgcagaacaccttatgatgagtcacaattttatattggctgtgatcggtgtcagaattggtaccatgggcgctgcgttggcatcttgcaaagtgaggcanagctcattgatgagtatgtctgtccacagtgccagtcaacagaggatgccatgacagtgttcacgccactaacagagaaggattatgaggggttgaagagggtgctccgttccttacaggcccata

SEQ ID NO: 8225 - DNA, 569 bp, Homo sapiens
ccaaatcttagctatttgaggaatgtagggagaaaagccaccttctctctctatgtctgaaggttcccatggctgtctctttgcccaaggggcaaactttccatcagggcatcttctgtgcctctgaggatcattttccaattataggcaatggtagtacgtgtttcagtgcagaatgagatagagttgtttaatttgacaataaagcgatgcgtcaaaaacctcagtcaacacagtaagtgttttcttgttttcctgctgaccaacctaattctggtttcatacagggcagccaggtgcccacctaaaagactgcacttctcaacttccagttgtttctatggataatggttggaagcagaaattgggttggggcttccagataatcccccctcacagggactgcttcaagagaaagggatgccctttggttctttctcctttccactgcctggaatgtgatgtctgacactgtggcagccatactggcataatgaggccaactctctgccatgctaagagtggcagagctgggaattgaaaagagcctgctagccttgggttgcttc

SEQ ID NO: 8226 - DNA, 636 bp, Homo sapiens
  unsure (603): n=A,T,C or G
  unsure (615): n=A,T,C or G
ccaaatgggagagtggttacaacacacgagctacaaactacaatgctggagacagaagcactgattatgggatatttcagatcaatagccgctactggtgtaatgatggcaaaaccccaggagcagttaatgcctgtcatttatcctgcagtgctttgctgcaagataacatcgctgatgctgtagcttgtgcaaagagggttgtccgtgatccacaaggcattagagcatgggtggcatggagaaatcgttgtcaaaacagagatgtccgtcagtatgttcaaggttgtggagtgtaactccagaattttccttcttcagctcattttgtctctctcacattaagggagtaggaattaagtgaaaggtcacactaccattatttccccttcaaacaaataatatttttacagaagcaggagcaaaatatggcctttcttctaagagatataatgttcactaatgtggttattttatattaagcctacaacatttttcagtttgcaaatagaactaatactggtgaaaatttacctaaaaccttggttatcaaatacatctccagtacattccgttctttttttttttttttttttttttganacagtctcgctntgtcatccaggctggagtgca

SEQ ID NO: 8227 - DNA, 389 bp, Homo sapiens
ctgtgatgagttgataccagagtatctcaattttatccgtggtgtggttgactctgaggatctgcccctgaacatctcccgagaaatgctccagcagagcaaaatcttgaaagtcattcgcaaaaacattgttaagaagtgccttgagctcttctctgagctggcagaagacaaggagaattacaagaaattctatgaggcattctctaaaaatctcaagcttggaatccacgaagactccactaaccgccgccgcctgtctgagctgctgcgctatcatacctcccagtctggagatgagatgacatctctgtcagagtatgtttctcgcatgaaggagacacagaagtccatctattacatcactggtgagagcaaagagcaggtgg

SEQ ID NO: 8228 - DNA, 355 bp, Homo sapiens
tcgacttttaaaagaggtatgagggctgggcgtggtggcttatgtttgtaatcccagctacttgggaggctgaggttgcagccaagattgcgccactgcactacagcctgggcgacagagcaagactctcaaaaggaggcatgaaatgcacctcaatcttttgctccaagtctgccaaagattgtcaaaccctccctgttaaaaaaaaaaatcagtttacctactctcccttctatataaaggaccctaaaattaaatgtcaatgccaaaatgcgaagtgcagatcgtcttctctccaaataagagttacttggaatccttaacaaatccaaggagaagaagcgaccactgcgaa

SEQ ID NO: 8229 - DNA, 337 bp, Homo sapiens; identical to SEQ ID NO: 7576

SEQ ID NO: 8230 - DNA, 286 bp, Homo sapiens
ggcatctctgtactgaaccccaacaaaaccaaggtccagggaagctgtgagggtgcccatccccacctgcttctctcattcccctatggacacctcagctttggattcatgcaggacctccagcagaaggttgtctacctgagctacatggcggtggagtgcaatgtgtccttcccccacgcagcacagtggacattctcggctcagaatgcatcccttcgagatctccaagcacccctggggcagagcttcagttgcagcaactcgagcatcattctttcaccag

SEQ ID NO: 8231 - DNA, 587 bp, Homo sapiens
ctggcattggtctagagctttataaggccattcagcgagggaccatcaagtgcaactttgcgggggttgccttgggtgattcctggatctcccctgttgattcggtgctctcctggggaccttacctgtacagcatgtctcttctcgaagacaaaggtctggcagaggtgtctaaggttgcagagcaagtactgaatgccgtaaataaggggctctacagagaggccacagagctgtgggggaaagcagaaatgatcattgaacagaacacagatggggtgaacttctataacatcttaactaaaagcactcccacgtctacaatggagtcgagtctagaattcacacagagccacctagtttgtctttgtcagcgccacgtgagacacctacaacgagatgccttaagccagctcatgaatggccccatcagaaagaagctcaaaattattcctgaggatcaatcctggggaggccaggctaccaacgtctttgtgaacatggaggaggacttcatgaagccagtcattagcattgtggacgagttgctggagacagggatcaacgtgacggtgtataatggacag

SEQ ID NO: 8232 - DNA, 364 bp, Homo sapiens
cctattctgaactgcagatgctgtcccccagcgagcggcagtgtgtggagacggtggtcaacatgggctactcgtacgagtgtgtcctcagagccatgaagaagaaaggagagaatattgagcagattctcgactatctctttgcacatggacagctttgtgagaagggcttcgaccctcttttagtggaagaggctctggaaatgcaccagtgttcagaagaaaagatgatggagtttcttcagttaatgagcaaatttaaggagatgggctttgagctgaaagacattaaggaagttttgctattacacaacaatgaccaggacaatgctttggaagacctcatggctcgggcaggagccag

SEQ ID NO: 8233 - DNA, 627 bp, Homo sapiens
ctgtggctgtctgtcagagaagcacatttttctgcagataattagaatggcttcccccatctctcacggactgtcccaagtctagaaaagaattgagttcctcttctattagtcaaataaaagggaagagaatgtttgtcttcctttcctttctgtagtgttaagaaaataaacgaacttaatgattctaaattatcagtgagcttaacactgtactatagaccaaagattaccttttcaaaaagtcctttgaggtgaaatattttgtatacgtaatacatagatgcacatataaacacacacatatagaatctcaatattttaacacttctttgggtagctgtactaactcactaaccctgaggaaaaagttaagaaattgaaagtgttttcttcaaaagttgagatttaacaataaaaggtgttactttgataactaaaaggaactttattatcctcttcctaaaataaaccaatgcctattctgaaaatggcacttgcaattacaatttgccattatcaaagctaccactgaggtagaggcattatctaaaacaaataccacttatcatttattggcagttacctcgagagagacccatacaccatcttctagcagagcacagt

SEQ ID NO: 8234 - DNA, 276 bp, Homo sapiens
ctgagataacgaggaaatattctgaaatggatcccaaatatttcatcttaattttgttttgtggacacctgaacaatacatttttttcaaagacagagacaattacaacagagaagcagtcacagcctaccttattcacatcatcaatgtcacaggtattggctaattctcaaaacacaacagggaatcctttgggtcaaccaacacaattcagcgacactttttctggacaatcaatatcacctgccaaagtcactgctggacaaccaacaccag

SEQ ID NO: 8235 - DNA, 312 bp, Homo sapiens
  unsure (15): n=A,T,C or G
  unsure (28): n=A,T,C or G
  unsure (118): n=A,T,C or G
  unsure (180): n=A,T,C or G
  unsure (199): n=A,T,C or G
  unsure (211): n=A,T,C or G
  unsure (215): n=A,T,C or G
  unsure (232): n=A,T,C or G
  unsure (234): n=A,T,C or G
  unsure (235): n=A,T,C or G
  unsure (244): n=A,T,C or G
  unsure (264): n=A,T,C or G
  unsure (271): n=A,T,C or G
  unsure (273): n=A,T,C or G
  unsure (281): n=A,T,C or G
  unsure (285): n=A,T,C or G
cagctagtacccggngggtcaccatgangttcaatcccttcgttacctcggaccgcagtaaaaaccgcaaacgtcacttcaatgccccctcacacgtgcgcaggaagatcatgtcatncccgctttccaaggagctgcggcagaagtacaatgtccgctccatgcccatccgcaaggacnacgaggtccaggtagttcnaggacactacanaggncagcaaattggcaaggnanntccaggtgnacagaaagaaatatgtcatntacatcnancgggtgcngcgngagaaggccaacggcacaactgtccac

SEQ ID NO: 8236 - DNA, 601 bp, Homo sapiens
  unsure (576): n=A,T,C or G
aaaaaaaaaaaaaggggggggcacattttaagttgtcaacaaaattttttttcatcataaagttatacaactatagaggatgtaatttttgacctattttaaatattgtcattctaaaataagcatgtaatatcactttcaggatatattcagtggaatctaaatatcatagtggtttgacctcttacatcattcttttaaaagtagtcttttattaagagtcaaaaattttatatttttgttttcgttggactaattctaaaatttaagttcctcttacggaatgttatcaaaaattatatagttatatgcttagaagtcttctattgattaagccatcaaacttaagtacatcaaaatttgtactttaaagtttaaattcttttttccttgtgaacataatcctataaactaaaattttcctggaccaagttatttttgtagtttactaatatacaattgatcaaaacaatataaagctatcgtaacatgtgaaagattatacaaattgtaaaaattttgttggaaatatgtcttaatgagatgattagggctgtttttcccaattcacatttnccgtagggaaatattccttaaaact

SEQ ID NO: 8237 - DNA, 632 bp, Homo sapiens
ctaatatcataaataaggttgtttaagacgtgcttcaaatatccatattaaccactatttttcaaggaagtatggaaaagtacactctgtcactttgtcactcgatgtcattccaaagttattgcctactaagtaatgactgtcatgaaagcagcattgaaataatttgtttaaagggggcactcttttaaacgggaagaaaatttccgcttcctggtcttatcatggacaatttgggctagaggcaggaaggaagtgggatgacctcaggaggtcaccttttcttgattccagaaacatatgggctgataaacccggggtgacctcatgaaatgagttgcagcagaagtttatttttttcagaacaagtgatgtttgatggacctctgaatctctttagggagacacagatggctgggatccctcccctgtacccttctcactgccaggagaactacgtgtgaaggtattcaaggcagggagtatacattgctgtttcctgttgggcaatgctccttgaccacattttgggaagagtggatgttatcattgagaaaacaatgtgtctggaattaatggggttcttataaagaaggttcccagaaaagaatgttcatccagcctcctcagaa

SEQ ID NO: 8238 - DNA, 336 bp, Homo sapiens
  unsure (31): n=A,T,C or G
  unsure (38): n=A,T,C or G
  unsure (54): n=A,T,C or G
  unsure (97): n=A,T,C or G
  unsure (117): n=A,T,C or G
  unsure (140): n=A,T,C or G
  unsure (142): n=A,T,C or G
  unsure (164): n=A,T,C or G
  unsure (245): n=A,T,C or G
  unsure (263): n=A,T,C or G
  unsure (312): n=A,T,C or G
  unsure (321): n=A,T,C or G
cttttttttttttttttttttttttttttanatatttnaaatacaactttattntgattctaaacgaaaaggaatgggaatgacagtaacaaacaanatttcaccactgaatattgngatgtgactgcagcagtcttatntntgaaactcaaggaatcaactgngttctaaaacagctaaatatgcaggtccaaacaatgaagttattttttaaactgccacattcactccgaagcccactcatntccttcagcatcccacanatgaagcacatgttccgcttagctagataataatgagggggcacacacnctgcaccgntgacatcacaggaca

SEQ ID NO: 8239 - DNA, 488 bp, Homo sapiens
  unsure (387): n=A,T,C or G
  unsure (477): n=A,T,C or G
ctctttgggacatttaaccatactgtttgacaggaatgtaaggtaattattgacaaaagcacttttagatttccttgattaaagaggaaccatcagttttagatcagtaataatagttgtttatccattagaaaattgcatagctactgttaaggttttagttacattgcattcatgcattcaagttttaaatcttaaatttctttttattttcttcattttaaaagtacagaagtcagattctatttgtgcattttattgtcagaagctttgttgtgtatctttattatcttaactatttatttcagcatatatatagagacaagtctagaagctccctgaaaaactgacttgcgaaaaggaatcacagtggggaaagacttttanttaacaaaaccttaaacaaaaatggaatataaaatgattttttcccagccattgagaccaaatatatatggaatcttgactcttaattgnttgtctttaat

SEQ ID NO: 8240 - DNA, 162 bp, Homo sapiens
ctgcttcttcttgaagtaagcatcagtaagatgttttgggatttttacattgctgatatcgattttggttgaagtggcaatgacaaatttctggtgtgttcttcgtagaggaactcgattgaggaccagaggtccagtcacaagtaataagccactagccag

SEQ ID NO: 8241 - DNA, 553 bp, Homo sapiens
cctgtgagtgaagtgcctctcagagcagtcacccagggaagggaggagggcagggaacggggctaggggagatgcagggacagaaatcagcagaaacactccatgctggttctgactcgctccatctcgtgcaggaagctgtagaactgaggcaaggttaattctatatacacattttcggtttgatttcctttcttaaccaccaactttagttgtaaaaatatacttcccactttctccaattcgctgctcccagatgtcactccaaatttccactccatatctatgagctggttaatcatcagagtctgacctatggcccatcgagcaagggtgggagcattctgcttccacttttcagaaaagtaagtggctttctcctcactaagacccagagttatgaaatccgcctggacctgcttggctgtgagactcttcttcaaagcaccatttggaaccagaaggaggcttttcacgatgcttctgagggagccaagactgatctgattggtggtggcaaattcagagagctgagccagaaatctttccacct

SEQ ID NO: 8242 - DNA, 543 bp, Homo sapiens
  unsure (406): n=A,T,C or G
  unsure (408): n=A,T,C or G
  unsure (427): n=A,T,C or G
  unsure (428): n=A,T,C or G
  unsure (435): n=A,T,C or G
  unsure (441): n=A,T,C or G
  unsure (444): n=A,T,C or G
cctactgtaaagagatgatgcatggtaaaaggaaaatggcagctctatgttattaccagtagtgaaggtgaatgatggattgttacatacagagtaagacttaaatgttgtgaagtttcctacagtttgacaaccaaaacatctaaaaaattcaaataaattttaaggtaatcttgatcttggttgtgagttgcaccagagaggacagtttatttttagttaacttgtacttaacctgcacaataagagtggtgactgactcaaatgtaggtagtactttattgtattccaatttaaaaaaacaaaattaagtctatattttaaaaactctgacaatagcaagatatttaatgaactctacttcatatctagttcatttttttttctggtttgaaaaaaagatcancnttccctgaataaacaaaanngaatgtnaataancangaaaatacaaaaccataatttccaaaaacgaaatgaatgggccaacagtaaaatgcacaatgagccacaactgccctggtatttaagaaaataaaggtc

SEQ ID NO: 8243 - DNA, 462 bp, Homo sapiens
acgaggcaaaaaaaaaaaaaaaaacagtaaaaggtgtctaaataggaaaggaagatgtgaaattatcactgttacctgacaatgtgacgttacatacaaaaagccacaaagactccagaaaaaaactattagacctggtaaatgaatacagtaaagttgcaggatacaaaatcaacctacaaaaaatcagtagtgtttctaagtactaacaacaaactatctgaaaaagaaatcaagaaaacaataccatttataatagctaccaagtaaaataaaatacgtaggaatacatttaaccaacaaggtgaaagagccatacattgaaaactgtaaaacattgatgaaagaagttgaagtctgcaataaaggaaagatactctgtattcatagattagaagaagaattgttaaaatgcccatactactaaaagtgatttgcagattcaatgcattccctataaaa

SEQ ID NO: 8244 - DNA, 447 bp, Homo sapiens
ccactgtcacggtctgtctgacacttactgccaaacgcatggcaaggaaaaactgcttagtgaagaacttagaagctgtggagaccttggggtccacgtccaccatctgctctgataaaactggaactctgactcagaaccggatgacagtggcccacatgtggtttgacaatcaaatccatgaagctgatacgacagagaatcagagtggtgtctcttttgacaagacttcagctacctggcttgctctgtccagaattgcaggtctttgtaacagggcagtgtttcaggctaaccaggaaaacctacctattcttaagcgggcagttgcaggagatgcctctgagtcagcactcttaaagtgcatagagctgtgctgtggttccgtgaaggagatgagagaaagatacgccaaaatcgtcgagatacccttcaactccaccaaca

SEQ ID NO: 8245 - DNA, 494 bp, Homo sapiens
  unsure (437): n=A,T,C or G
  unsure (488): n=A,T,C or G
cctctaaaatcagatcccctagttactcctctgttctgaatctggggaagtagtaaaccaaaaagacagggaaaaccagatatttagagtcgaagcagcatgcaaaaaataataatgtttttaactaatgaaggctactggagttactaagaatcacctaaaaatgtgctactgtaccttgctcattttgcagatttagaagctgaaacatgggttaggttacttactaaaagtccacctgtggcaacctgcaaataatgcttatttatactaaagatgagtttatctgatagagttaggaaatttcttcttttgagtaagagtattgctataacatatatttttttctgaaatgttttaaaatagaagtacacctaattgttattggttaaaaaaaaaaagccatatgtgaatgaggttggtttttgggttttttnttttctgaattgtattagtccaaaagaactaaattagggtacttgtgctgnaccaaa

SEQ ID NO: 8246 - DNA, 490 bp, Homo sapiens
  unsure (450): n=A,T,C or G
  unsure (476): n=A,T,C or G
cctagtagtggggtgaggcttggattagcgtttagaagggctatttgttgtgggtctcatgagttggagtgtaggataaatcatgctaaggcgaggatgaaaccgatatcgccgatacggttgtataggattgcttgaatggctgctgtgttggcatctgctcgggcgtatcatcaactgatgagcaagaaggatataattcctacgccctctcagccgatgaacagttggaataggttgttagcggtaactaagattagtatggtaattaggaagatgagtagatatttgaagaactgattaatgtttgggtctgagtttatatatcacagtgagaattctatgatggaccatgtaacgaacaatgctacagggatgaatattatggagaagtagtctagtttgaagcttagggagagctgggttgtttgggttgtggcttagtgtcanctcgagataataacttcttggtctangcacatgaatattg

SEQ ID NO: 8247 - DNA, 493 bp, Homo sapiens
  unsure (33): n=A,T,C or G
tgggagagctagactaagttggtcatgatgcanaagctactcaaatgcagtcggcttgtcctggctcttgccctcatcctggttctggaatcctcagttcaaggttatcctacgcagagagccaggtaccaatgggtgcgctgcaatccagacagtaattctgcaaactgccttgaagaaaaaggaccaatgttcgaactacttccaggtgaatccaacaagatcccccgtctgaggactgacctttttccaaagacgagaatccaggacttgaatcgtatcttcccactttctgaggactactctggatcaggcttcggctccggctccggctctggatcaggatctgggagtggcttcctaacggaaatggaacaggattaccaactagtagacgaaagtgatgctttccatgacaaccttaggtctcttgacaggaatctgccctcagacagccaggacttgggtcaacatggattagaagaggatttta

SEQ ID NO: 8248 - DNA, 510 bp, Homo sapiens
  unsure (32): n=A,T,C or G
  unsure (77): n=A,T,C or G
  unsure (101): n=A,T,C or G
  unsure (115): n=A,T,C or G
  unsure (186): n=A,T,C or G
  unsure (239): n=A,T,C or G
  unsure (250): n=A,T,C or G
  unsure (291): n=A,T,C or G
  unsure (426): n=A,T,C or G
  unsure (465): n=A,T,C or G
  unsure (483): n=A,T,C or G
ctggtggatacagcgcgcacacagaagacggnctaccagcggaatcgaatgagatttgcccagaggaacctccgcanagacaaagatcgtcggaacatgtngcagttcaacctgnagatcctgcctaagagtgccaaacagaaagagagagaacgcattcgactgcagaaaaagttccagaaacantttggggttaggcagaaatgggatcagaaatcacagaaaccccgagactcttnagttgaagttngtagtgattgggaagtgaaagaggaaatggattttcctcanttgatgaagatgcgctacttggaagtatcagagccacaggacattgagtgttgtggggccctagaatactacgacaaagcctttgactgcatcaccacgaggagtgagaagccactgcggagcatcaagcgcatnttccacactgtcaccaccacagacgaccctgtcatccgnaagctggcaaaaactcangggaatgtgtttgccactgatgccatc

SEQ ID NO: 8249 - DNA, 436 bp, Homo sapiens
  unsure (341): n=A,T,C or G
  unsure (411): n=A,T,C or G
ctgccccagtcaatgaagattatgcatgagatcatgtacaaactggaagtgctctatgtcctctgcgtgctgctgatggggcgtcagcgaaaccaggttcacagaatgattgcagagttcaagctgatccctggacttaataatttgtttgacaaactgatttggaggaagcattcagcatctgcccttgtcctccatggtcacaaccagaactgtgactgtagcccggacatcaccttgaagatacagtttttgaggcttcttcagagcttcagtgaccaccacgagaacaagtacttgttactcaacaaccaggagctgaatgaactcagtgccatctntctcaaggccaacatccctgaggtggaagctgtcctcaacaccgacaggagtttggtgtgtgatgggaanaggggcttattaactcgtctgctgc

SEQ ID NO: 8250 - DNA, 503 bp, Homo sapiens
ctggccctgtcctgcagaatgaggtgtccggcccggtacagtgggtgttcatgcagatctgtctgggcgggaaacaccagcagctccggcatcaaggggtccaggagaaaatgcttccccttgagggctcgtaagtcatcgaggctgccagggaagaaccattcattcatcatttcctgaatttctccctgccaggccctatttcaacggtccattcatgcaacaaatgttaccacagctatggagaaatcaacagggtgataagggaatccgggatccgcagttgagggaatgggttgtcaagccagacttatgggtcaggagccccctctactgtttaccagcagtgggagcctgggcaagtgattcaatctcaagccccactggcatctctgtaaaatagtaggtgtgaggattcaatgagccaatatatccaagatacttacgtgccacaatttaataaatgttagctattcctgttgaagcataaccttggagaaagg

SEQ ID NO: 8251 - DNA, 236 bp, Homo sapiens
ccaagaagtacaagggccaaaagggcctggtcatcgccaagatggacgccactgccaacgacgtccccagcgaccgctataaggtggagggcttccccaccatctacttcgcccccagtggggacaaaaagaacccagttaaatttgagggtggagacagagatctggagcatttgagcaagtttatagaagaacatgccacaaaactgagcaggaccaaggaagagctttgaagg

SEQ ID NO: 8252 - DNA, 463 bp, Homo sapiens
  unsure (338): n=A,T,C or G
  unsure (356): n=A,T,C or G
  unsure (369): n=A,T,C or G
  unsure (375): n=A,T,C or G
  unsure (380): n=A,T,C or G
  unsure (434): n=A,T,C or G
  unsure (453): n=A,T,C or G
tcgacaaatacccacatgctgttttcctctgctaacgagttgcagagaaaaaaaacagcatgaatttggattttaatcacacatttcttctggaatctcatgtggattaaagatgccagggacagacatttgacgtttatgtttctcttcatcagcctgccgtagggctatttctctctcttccaaaaacaaatcagaagtgtcttcacctgcaaattcctttatttgaactaggaaatctcttaaatgttccttgaaagcaggaatatcttgatttaagctgaaaagccctgtcacaaagagctttacttgagcatcttgtaggtgagggaaggccnacttaaggagattagccncatattcctgaanaaaganttggntgttaactggatttccaggatttaatgatgtacttatttttccttcttcaaccnaattaaacatatatgcaangaattgatgc

SEQ ID NO: 8253 - DNA, 466 bp, Homo sapiens
ccacaggggaaggcaagaggcgatagctgggggtcacttgtcactagatggaagctccttggtccacacagtcccaaagaaaggtctgcccttgggcccacgaaacccatcccagccctcacaggctgaacctcaccctgggttttcccagagaggtgcccaagaagacccaagctgccccaagtcagaggagcagcaggaaacagcctcagaagtccgtcactcttcagtactcctcccttagaatgtccacttcctgtttggtgaccatggcaaccaaaagacaatggcagtgcagtgcgtgtgggatgggggagctccatcttccttgggtacatggggaggagactccagtgaccaggagaagcggggagagccatgggagatgttagagggacccagagaagatgggggacaggaaaaaggagagaatctgtctcaagtaaatggcctcctgccttggacc

SEQ ID NO: 8254 - DNA, 447 bp, Homo sapiens
ctgaaaggaggtggatggggacagagcaccaaggggaaggggccctcggcccaaggggggaggaacctagcccccaccccgctacagctccccactgaattcacagcacagagaacacctctcgcccaacaactccacatggaggtataccaagtccaggggtcaaaggagcaggtgggtgacagatgggcaggggcagtgaagatgacagcaggctcaggaggggaggtggcagaaacttcctcctacccatgggaggagacgatggggcgactgatattgctgttggtggtcatggcattcagctcccacctgatatcatgaggcaaacaggactggtctaggttatactgaatcacggccagtttgcacagagtcttcagactagggctaaagtccaaaatgtgtaagtcagaatgatctataaggtcaaattcatctcccagg

SEQ ID NO: 8255 - DNA, 539 bp, Homo sapiens
ctgacatcctaaaaacgaagtcaaattagggaaggatggccgtttccttgagtcaaaagcccagcaggattgcattataatgtatatttcttctgtagcataaaatggctgatccattttaaatccattttgaatcagtttgtagaagttagcatcaaccggaatgccagggtaaggattcacaccaagtgagaagatttcccacagtaatattccatatgaccagacatcactcttaatggtgtagatgccttcaaacaggctttcgggggccatccattttacaggcagacgggcattgcccctgacaacatagttggaatcactcatgatatctcgagccaatccaaagtcacatatcttcaccactttcccgtgggtgacaagcacgttcctggcggccaggtctctgtgaacacacgacttaaattccagaaattccattcctttggcaacttgatatgcaaagcaaagaagatcttcaaatgtaagcacattcaagtcctcctcttcttccagccttttttggttttcatatt

SEQ ID NO: 8256 - DNA, 401 bp, Homo sapiens
ccatcggtgctgaaattgagcattttaaatagtacagtaggctggtatacattaggaaatggactgcactggaggcaaatagaaaactaaagaaattagataggctggaaatgcttactttctgctctcattttctttcattttgtctgctgtctttttgaatgccaatactttcatttaaaatgttttgggagcacggcaacccaaaatgactgaacggtggtccaaaaatccaaaccaactgataattacttctcgaggtgataggaaaggcacaggaagttaggactttggctgaaatgatgaaaacacatgttcgccattttagggatcagcgcctcgactcctgccacctccggctccaacgatgatcatgtttggatgtatttattgaattgtcc

SEQ ID NO: 8257 - DNA, 383 bp, Homo sapiens
ctggcagaccccccaaccacatcagaggagttttcatttcttcctgggctgcttatctgggaagccttcaaagaattcgttacacatcatggcgatgcaggacaggaagacacagtactcttggaagtccacctcgttgtccctgttgctgtccaagttgctcatcagcttctggaaagcagcttcatctgtccttttccccaagaagctgggcagctcccgggtcagcagctcctttagttctgacttgttgagcttgaacttgtcaccctctttgcccgagtacttgtggaaggtggacaccatcacatccagggccttctccagagggcacgccatgacagcagtcaggatcaaaccaagaaagaagaagcgctgaggag

SEQ ID NO: 8258 - DNA, 442 bp, Homo sapiens
  unsure (413): n=A,T,C or G
cctagtagtggggtgaggcttggattagcgtttagaagggctatttgttgtgggtctcatgagttggagtgtaggataaatcatgctaaggcgaggatgaaaccgatatcgccgatacggttgtataggattgcttgaatggctgctgtgttggcatctgctcgggcgtatcatcaactgatgagcaagaaggatataattcctacgccctctcagccgatgaacagttggaataggttgttagcggtaactaagattagtatggtaattaggaagatgggtagatatttgaagaactgattaatgtttgggtctgagtttatatatcacagtgagaattctatgatggaccatgtaacgaacaatgctacagggatgaatattatggagaagtagtctagtttgaagcttanggagagctgggttgtttgggttgtggctc

SEQ ID NO: 8259 - DNA, 357 bp, Homo sapiens
ctgttgaggtgcagggcctcagctttgtcccggtgtgccacctctgaaccctgctgtctggtttaagtaccactcctgtgggaatggtggcattgttcctagttgtgcccggttcccactcccctcccccaggactggttgatgtctagagctgcctttcacgtggccccaccctcccctcttgcatagtggatctgaaaagcagcaccttgtgacttaacatcacctgcttcatgtgctgggctagctctcgtgccagccaaactcgggaggaaaagggacctaggatctaggcaggggctgggctgaaatcagtagagggcagggaggaaagaacacagttcccacgctctcatc

SEQ ID NO: 8260 - DNA, 391 bp, Homo sapiens
ctgaaaaaatcctggcaaactacaagctgtccacaagaaagcaaagcaacatgtttgaaggggtatggagtgctaactctgtgccacttttgcaagcaattttgctcagtctgtcattgtattagccttaacaaaactccttgtaattatagacgtttttattcaaaataagatcttactattatacaggtttctctcttttgactatatacagaagtgcaaaaagtcaaccttctccctagacgttccaacatgctaaattgcagcataatcaaccctcaagagtttgcacacacgctataattttcattacgtaaactttgagtatttggattatcaacaaaaagtcccttgttctatttattgattatgcagcttatttataacaagg

SEQ ID NO: 8261 - DNA, 501 bp, Homo sapiens
  unsure (457): n=A,T,C or G
  unsure (458): n=A,T,C or G
ggcaggtctgctgctaccaccctgactggaccagttctatcaagatacaacctagcaacaccctggaactcctagtcacaggcttactccccaaacccagcctattagcccagcctggtcccatggtggcccctggcgaaaatatgactcttcagtgtcaaggggaactgccagactcaacatttgtcctgttgaaggagggggctcaggagcctttagagcaacagaggccaagtgggtacagggctgacttctggatgccagcagtgagaggtgaagactctgggatctatagctgtgtttattatttggactctactccctttgcagcttcaaatcacagtgactccctggagatctgggtgactgataagccccctaaaccctctctgtcagcctggcccagcaccatgttcaagttagggaaggacatcacccttcagtgccgaggaccccnnccaggtgttgaatttgtcctagaacatgatggagaagaagcac

SEQ ID NO: 8262 - DNA, 347 bp, Homo sapiens
  unsure (278): n=A,T,C or G
  unsure (317): n=A,T,C or G
  unsure (332): n=A,T,C or G
ccaagagatgcagtgccaggaacccttaaacagttgcacagcatctcagctcatcttcactgcaccctggatttgcatacattcttcaagatcccatttgaattttttagtgactaaaccattgtgcattctagagtgcatatatttatattttgcctgttaaaaagaaagtgagcagtgttagcttagttctcttttgatgtaggttattatgattagctttgtcactgtttcactactcagcatggaaacaagatgaaattccatttgtaggtagngagacaaaattgatgatccattaagtaaacaataaaagngtccattgaaaccgngattttttttttttt

SEQ ID NO: 8263 - DNA, 297 bp, Homo sapiens
ctgtgtctctctttcctcttctgttcctataagggcagggcctccttcaggaacagccaccagtgagcttcctcctcccttctggtcagttggatttgtcactgttcagcatcttttcgatgattttcttaactatgggggatgcaggattgaggcaagctttccgcccattcttgagtgtggctatgacttcggtttgggcgcagtggggtccgggggacttcacgttcacactttggatgttcttggggtgaattccctgcagggtctgcaagcactggcagcgcagttcagtgg

SEQ ID NO: 8264 - DNA, 505 bp, Homo sapiens
ccatggttgaatatctggatgctatagaacatgcttataatggacttgctgcccagagatgtttaggaagttcaagtggattctgagccagatggttgctttagatccgcaccagtacgcaaaagttctatagccaacatactgcgttaacttgacacggtttagaccagttagactgtgcaaaaataggtagtctgcacacactacatgagccctttagcaccctgtttgctttagcactttcatcactttgttttccaaaaactcaaaacagccaaaaaactgatttgatatgggaatcacggtatttttcttgtgttttgttttgtttgtttgtttccaaattgtctaaatcactaaccaagatcattcgaccagcttaggaaaaacaaatagattgtgcatttgagttcagttttgattctgtaaagactttgcaaagcctacttcactaattatgtgctactgttaaatggtatttgataggttgttggaaaagataggg

SEQ ID NO: 8265 - DNA, 491 bp, Homo sapiens
  unsure (461): n=A,T,C or G
  unsure (470): n=A,T,C or G
accagtctcagcctcccaaagtactgggattataggcgtgagccactgtgcacggctgctgacccacatttaatagtataatgacattccctctaacagtgtcatttttgttttctttgtaccaataggtaatttgtcgtccagatgctctgctatatgtgaagtatcatttttctattgaacacaggtcatccttcagtttcatttttctcttcaccaattggatgctgcatacctggttttcagctcattcatgtgttagatcccctgtgtcctagatcgtatacctttctctttcttgatttactttctcattttatagagcacatcattgagtagaaagatggaaaataatttttgggatttatacaattaaaaatcattagtctcccttcaactttagtaataaaattgtagattggaaattattttccctcagaattttaaaactctttttctgnttctcttancttcttttcaggttgagaaga

SEQ ID NO: 8266 - DNA, 488 bp, Homo sapiens
  unsure (299): n=A,T,C or G
  unsure (455): n=A,T,C or G
  unsure (456): n=A,T,C or G
  unsure (472): n=A,T,C or G
ctgtggtttgttgtcaattggtggctgttggctggtctgcttagttatatcagtgaggaaggggacaatgttagaccttgtactgctgggacttagtgatgtcactgatgacaggaagcttctagttggttggttagtttcattggcctgatctggagagagtggactgagaattactggggctgtgagaacttgccttccctagaatcatggcctgtctttttcccacacaggaacttgagcttgttcctccctacacaggaacttgggggccaatagcattgtccctgattttcatnttttcactggttgtattattggagaattttactgtttaaaatgtaaatgaaaaatttatattctcattcagttcacatcagcaaagcattactcccatttaggggtagttttttttttttttttaaatgacatctgctaaaatgggatcctttatnnatcagttttagttacnatattattttctccaa

SEQ ID NO: 8267 - DNA, 253 bp, Homo sapiens
ccttatgaaggacattgtaggagccaatgagaaagaaatagccctaatgaatgctttgactgtaaatttacatcttctaatgttatcattttttaagcctacgccaaaacgatataaaattcttctagaagccaaagccttcccttctgatcattatgctattgagtcacaactacaacttcacggacttaacattgaagaaagtatgcggatgataaagccaagagagggggaagaaaccttaagaatagag

SEQ ID NO: 8268 - DNA, 510 bp, Homo sapiens
cactgtcaggaccaatttacttgatttttgaatactgttgctatggtgatcttctcaactatctaagaagtaaaagagaaaaatttcacaggacttggacagagattttcaaggaacacaatttcagtttttaccccactttccaatcacatccaaattccagcatgcctggttcaagagaagttcagatacacccggactcggatcaaatctcagggcttcatgggaattcatttcactctgaagatgaaattgaatatgaaaaccaaaaaaggctggaagaagaggaggacttgaatgtgcttacatttgaagatcttctttgctttgcatatcaagttgccaaaggaatggaatttctggaatttaagtcgtgtgttcacagagacctggccgccaggaacgtgcttgtcacccacgggaaagtggtgaagatatgtgactttggattggctcgagatatcatgagtgattccaactatgttgtcaggggcaatgcccgtctgcctg

SEQ ID NO: 8269 - DNA, 486 bp, Homo sapiens
cgcgagcgccctgcagactgagggagagagagagaaagaggaggggaggaggaggaggattcagggaataggagctggggagcccttctgcgccacaggttcaagcgattctcctgcgtcagcctcctgaggagctgggactacagtgatatcagtatcaagataaaagtttggaatgggagaaaaattctcaaagcctgaaagaaaatctgtagttacttttggtgacgctgtccagttcccacaatgtatcattccttatctgaaactagacatcctctgcagccagaagaacaagaagtaggcattgaccccttgtccagttactctaacaagtctggaggagattcaaataaaaatggaagaagaacaagttctactttagactctgaagggacttttaattcctataggaaagaatgggaagaactatttgtaaacaacaattacttggcaacaataaggcagaaggggattaatgggcag

SEQ ID NO: 8270 - DNA, 362 bp, Homo sapiens
gtgtctcgtgggtgaatttgtaagtgatgtcctgctagttccagaaaagtgccagtttttccacaaagagcggatggaggtgtgtgagaatcaccagcactggcacacggtagtcaaagaggcatgtctgactcagggaatgaccttatatagctacggcatgctgctcccatgtggggtagaccagttccatggcactgaatatgtgtgctgccctcagacaaagattattggatctgtgtcaaaagaagaggaagaggaagatgaagaggaagaggaagaggaagatgaagaggaagactatgatgtttataaaagtgaatttcctactgaagcagatctggaagacttcacagaagcag

SEQ ID NO: 8271 - DNA, 496 bp, Homo sapiens
  unsure (412): n=A,T,C or G
  unsure (456): n=A,T,C or G
ctttcctgccagtgtcagaaaatcctatttatgaatcctgtcggtattccttggtatctgaaaaaaataccaaatagtaccatacatgagttatttctaagtttgaaaagtaaaaagaaattgcatcacactaattacaaaatacaagttctggaaaaaatatttttcttcattttaaaacttttttaactaataatggctttgaaagaagaggcttaatttgggggtggtaactaaaatcaaaagaaatgattgacttgagggtctctgtttggtaagaatacatcattagcttaaataagcagcagaaggttagttttaattatgtagcttctgttaatattaagtgttttttgtctgttttacctcaatttgaacagataagtttgcctgcatgctggacatgcctcanaaccatgaatagcccgtactagatcttgggaacatggatcttanagtcactttggaataagttcttatataaatacccccagcc

SEQ ID NO: 8272 - DNA, 508 bp, Homo sapiens
ctgccatctgggcatttgcaatgtccatgcatactcttgaagcagcattcaattctgttcccccttttcaatgtatggttcatggggtttggtatcttgataggactaaggaaggggaagctgtcataaaccaggaagggaaatatttaattggaaagaacaaggctgttcattcaaattgcatttcctacagatttatccaataatggacaagtcaagccgcacacgtcttgctctcattatctgcaatgaagaatttgacagtattcctagaagaactggagctgaggttgacatcacaggcatgacaatgctgctacaaaatctggggtacagcgtagatgtgaaaaaaaatctcactgcttcggacatgactacagagctggaggcatttgcacaccgcccagagcacaagacctctgacagcacgttcctggtgttcatgtctcatggtattcgggaaggcatttgtgggaagaaacactctgagcaagtcccagatatacta

SEQ ID NO: 8273 - DNA, 601 bp, Homo sapiens
  unsure (586): n=A,T,C or G
ctgggaagccacgagaatattgtgaacctgctgggggcgtgcacactgtcaggaccaatttacttgatttttgaatactgttgctatggtgatcttctcaactatctaagaagtaaaagagaaaaatttcacaggacttggacagagattttcaaggaacacaatttcagtttttaccccactttccaatcacatccaaattccagcatgcctggttcaagagaagttcagatacacccggactcggatcaaatctcagggcttcatgggaattcatttcactctgaagatgaaattgaatatgaaaaccaaaaaaggctggaagaagaggaggacttgaatgtgcttacatttgaagatcttctttgctttgcatatcaagttgccaaaggaatggaatttctggaatttaagtcgtgtgttcacagagacctggccgccaggaacgtgcttgtcacccacgggaaagtggtgaagatatgtgactttggattggctcgatatatcatgagtgattccaactatgttgtcaggggcaatgcccgtctgcctgtaaaatggatggcccccgaaagcctgtttgaangcatctacaccatta

SEQ ID NO: 8274 - DNA, 503 bp, Homo sapiens
cctggtagtgtgactacccggaataatcaggaaaggcatcaccaaggcagcagtagctgtgctgtgatcaaagaatgcacagggcttgtagctacaggagagagagaacagtggcaattccaggcagagggagtggcatgttcagcagcacaaggaggagagtggctgcccaggaaggaccctcaggagttctttccttgcagtaggggatggaggtggtgctaaggctggaagagagtgtgtggatccagattgcgaagcatttcaaatgccatgctagggagtttaaagatttttgccaaaatgaaatgatgtcaccagaaatagagcattacctgtctgcctggtgtgcattaggtggacagaagagggagacatagcaagtagaagactgttttaataaatagaccaggcaagaaattagatcttaactaaaagctcccaaatctttaggcatttcaggcatttctatgccagttggagactgggggaattccccgagg

SEQ ID NO: 8275 - DNA, 481 bp, Homo sapiens
gagcaattcctcgggaaaaaatatttagcatagcagtaaagactgataggatgcctcaaaattcttaagttcacacgtatttcttaacgaatatactttccattacaaggttctatattatagtttttaatgacaaacttattaaacatctgggaaaggtccacttccttaaacctcttctccaaatcaggaacaggttagattgacatatttaacaggtagatttaggcatggtgtaggaatcatatcacctgggatttgtggtataggcacatcttattgaaatgaatgttttatgactttacctgatgaaccattaaggactggacctgccgtttgaggacctgcattctagctgttgtgacaactgaccgaacgtctggcaccacactctcactaagaatttcactgatgaggcggtggtttctctggaaacgggcggtggctgtatgcttcattgaaaagccatcatcataatctg

SEQ ID NO: 8276 - DNA, 516 bp, Homo sapiens
  unsure (35): n=A,T,C or G
  unsure (62): n=A,T,C or G
  unsure (78): n=A,T,C or G
  unsure (100): n=A,T,C or G
  unsure (159): n=A,T,C or G
  unsure (169): n=A,T,C or G
  unsure (188): n=A,T,C or G
  unsure (212): n=A,T,C or G
  unsure (223): n=A,T,C or G
  unsure (233): n=A,T,C or G
  unsure (250): n=A,T,C or G
  unsure (274): n=A,T,C or G
  unsure (301): n=A,T,C or G
  unsure (311): n=A,T,C or G
  unsure (313): n=A,T,C or G
  unsure (329): n=A,T,C or G
  unsure (341): n=A,T,C or G
  unsure (356): n=A,T,C or G
  unsure (364): n=A,T,C or G
  unsure (382): n=A,T,C or G
  unsure (412): n=A,T,C or G
  unsure (419): n=A,T,C or G
  unsure (421): n=A,T,C or G
  unsure (464): n=A,T,C or G
  unsure (465): n=A,T,C or G
  unsure (489): n=A,T,C or G
  unsure (508): n=A,T,C or G
ccccccccttttttttttttttttttttttttttnaaaaaaaggattttaggtttctttggngaaacaaaagcagatntaaaaagttacaaagattttanattttcattcacaaaaaaagtcattcacattttacactatacacgttatgatataaatncaggaaagtnttatgtgcattgtaaaganaaaggaaaaatagaaacctactanatcaacacagngttgttctgngctctaaaatacctaangggggattacatttaatgcaacanccaagggaacctgcttaaacatactgngtattattgnanctagagtcattccttntaagccaaaggnggttttataaaaaanaatcaatnttgggccaatccctttgngccctttttctctttttctatgggcatttnatttttngnctactcttcttcaagttgctctaaactgaaattagggaaggannctcactttccattacaggtttttntttaaacattaaattaagnggataagg

SEQ ID NO: 8277 - DNA, 489 bp, Homo sapiens
tgacagtgcaacatcttaaccaagaagtaaatatgacctcagtgtcctataaataatgtaagagcaggatttgaaacttggagagctgttttctcatttcatgtacacttgccccaaattgtctttgaagtcgtgtgcattgcacgttggatgagccagggaaattattacattaacaagcattttgtgtgtgcgtagtagttactttgtactgagagaacttgctttggggtgcaattaaacaataaactgattttatttgggagaaacaaggaagggtgcacttaactagcaacctaagcatgatttttcagcttttgcccttagggtttaaattacaattccaaaatgttagacatactgtattttttcgttcagtgtggctttaattttcccctcttgcagtttgttctgtaatgccttttacatttggacacatagtttatgctttttagattttggttgctttcttgccaaaataagtgttaa

SEQ ID NO: 8278 - DNA, 449 bp, Homo sapiens
  unsure (370): n=A,T,C or G
  unsure (388): n=A,T,C or G
cctggctcaacaaaagggctggggattggccctgaaaggagagagctgactgtcctggctgatggacaggagatcctcttagcactaccctaaggcaggcagttgggcattggtgtagacaacaggaaagtccaggctatagccgtactcaaaaacctttctgttccctttctgccagccctagggattgagtccacattcagcacaggactctctgggtacagctctctttaggaagacacaaattgcatggtgaagtcagttatatcctggccgcctttggtccctcccaggaagacgggcatgttttctgcttgagaggtgctgatgtaccagttggggaactgggcagactcaaattccagcttgntattgatttctatcttgntgaagacaaatcgcttttccatcttcttctttgggtaatttttgggatctacactctccag

SEQ ID NO: 8279 - DNA, 493 bp, Homo sapiens
cttatttctcttgtcctttcgtacagggaggaatttgaagtagatagaaaccgatctggattactccggtctgaactcagatcacgtaggactttaatcgttgaacaaacgaacctttaatagcggctgcaccatcgggatgtcctgatccaacatcgaggtcgtaaaccctattgttgatatggactctagaataggattgcgctgttatccctagggtaacttgttccgttggtcaagttattggatcaattgagtatagtagttcgctttgactggtgaagtcttagcatgtactgctcggaggttgggttctactccgaggtcgccccaaccgaaatttttaatgcaggtttggtagtttaggacctgtgggtttgttaggtactgtttgcattaataaattaaagctccatagggtcttctcgtcttgctgtgttatgcccgcctcttcacgggcaggtcaatttcactggttaaaagtaagagacag

SEQ ID NO: 8280 - DNA, 422 bp, Homo sapiens
ccgcctgctactgagtaaggggcattcctgttacagaccaaggagaactggagaaagaaagagaaaatcagttcgtggttgcattgtggatgcaaatctgagcgttctcaacttggttattgtaaaaaaaggagagaaggatattcctggactgactgatactacagtgcctcgccgcctgggccccaaaagagctagcagaatccgcaaacttttcaatctctctaaagaagatgatgtccgccagtatgttgtaagaaagcccttaaataaagaaggtaagaaacctaggaccaaagcacccaagattcagcgtcttgttactccacgtgtcctgcagcacaaacggcggcgtattgctctgaagaagcagcgtaccaagaaaaataaagaagaggctgcagaatatgctaaacttttgg

SEQ ID NO: 8281 - DNA, 521 bp, Homo sapiens
ccacactctacttctgcttctgccacctatggggtcgaggcaggtgtggtgccttggctaagtccacagacttctgagaggcccacgctttcttcttctccagaaataaaccctgaaactcaagcagctttaatcagagggcaggattccacgatagcagcatcagaacagcaagtggcagcgagaattcttgattccaatgatcaggcaacagtaaaccctgtggaatttaatactgaggttgcaacaccaccattttcccttctggagacttctaatgaaacagatttcctgattggcattaatgaagagtcagtggaaggcacggcaatctatttaccaggacctgatcgctgcaaaatgaacccgtgccttaacggaggcacctgttatcctactgaaacttcctacgtatgcacctgtgtgccaggatacagcggagaccagtgtgaacttgattttgatgaatgtcactctaatccctgtcgtaatggagccacttgtgttgatggttttaacac

SEQ ID NO: 8282 - DNA, 285 bp, Homo sapiens
  unsure (240): n=A,T,C or G
  unsure (262): n=A,T,C or G
cggaggaaaaggttggggaacagctaaataggttgttgttgatttggttaaaaaatagtagagggatgatgctaataattaggctgtgggtggttgtgttgattcaaattatgtgttttttggaaagtcatgtcagtggtagtaatataattgttgggacgattagttttagcattggagtaggtttaggttatgtacgtagtctaggccatatgtgttggagattgagactagtagggntaggcccaccgctgcttcgcangcggcaaagactagtatggcaat

SEQ ID NO: 8283 - DNA, 310 bp, Homo sapiens
ccaacattaaaaaaaaaaaaaagtaagacaattgccctggaatcccatccccctcacacctccttggcaaagcagcaggagtgctaactagctagtgcttcttctcttatactgcttaaatgcgcataattagcagtagttgatgtgcccctatgttagagtagaatcccgcttccttgctccatttgcattactgcaggagcttctaactagcctgaattcactctcttggactgttaatgtgcatacttatatttgctgctgtacttttttaccatgtaaggaccccacccactgtatttacatccca

SEQ ID NO: 8284 - DNA, 535 bp, Homo sapiens
  unsure (473): n=A,T,C or G
  unsure (475): n=A,T,C or G
  unsure (497): n=A,T,C or G
ctggctctggcatgaattttatttttaaataatttgttatttaaaatgaattactgaggggacagcccggctctctcttcatgattgttaccgcaactatatacaacagtttgctttccagattcaatttcgctttttctacattagatataaaagggggtaggttgaaagaggggagggtaaaataaaaaacataaacacacagacatacacatatcctggtttgggattttgcacccaataacttaaaaaaaaagtgttgcaaaaacttctgcccactctccacctgaggaacaccatgcatttgagaaacacggactctgtcacataaacggtgctgcctaaaacagtatggaggcggggaaggaagctagcaggggttggaattcattttgaaaaaagattgttttgttagaaaaagcaaaaacaaaaaagcattagaaagtgggagccactgcacagcagtagcctananactggctgcgatatggtagctntgccttgatatcatcttcgtgtcttcaggcatagagaa

SEQ ID NO: 8285 - DNA, 521 bp, Homo sapiens
  unsure (340): n=A,T,C or G
  unsure (508): n=A,T,C or G
gagcccgttaggcagagtttgcagtgagccaaaattgagccactgctctccagcctgggtgacagagcaagactccgtctctaaatagatagatgaatgaatgaatgaatgaatgaatgaatgcagggcggccaggtgcagtggctcatgcctgtaatcccagcactttgggaggccgagggcagatcatgaggtcaggagttcgagaccaccctgaccaacatggtgaaaacccgtctctacaaaaaatacaaaaaaaaaaaaattagccaggcgtggtggcacacgcctgggtgagagtgagattccacctcaaaaaaaaaaaaaaaaaaaaaaaaangccgggcatggcagtcctgtggtccgatactcgagaggctgaggcaggaatttcacttgagcccacatggttgaggctgcagtgagctgtgccactgcactacagcaagaccctgtctccccaaccaaaaaaagaaaataaatgttcgtataatttaaaaagaggccnggagttcaagacc

SEQ ID NO: 8286 - DNA, 500 bp, Homo sapiens
  unsure (25): n=A,T,C or G
  unsure (31): n=A,T,C or G
  unsure (39): n=A,T,C or G
  unsure (101): n=A,T,C or G
  unsure (366): n=A,T,C or G
  unsure (378): n=A,T,C or G
  unsure (396): n=A,T,C or G
  unsure (417): n=A,T,C or G
  unsure (462): n=A,T,C or G
aaaattgaaaaaaaaaaaaaaaaangctaancaaaaaanccaacttgttttccattaataaaagggggaacctgagtcacatgaggactggattgtcttanctacgtacttggcaatgtcactacacaaagaagaggaagtttggagaaggtctcagtgacataagggaaagttttatgtagggcaagactaaaagcagattgattacctaaaaaaagtttcctccctctaaagatgtttccgtaatcccttcctggctactcctggaataaccctaaattttgtatcaacaatcattagctcaaaatagagctgggcagaaaatacttccctaagattcttttatactcataagcatgtttttgnttttcattttgntttgttttgcactgaggngtatttgggtaaaatttccgngtgtgtcatgtgggactagtacagacttgggagcccaaggcttgntaatatcacttgatgctttcttggaggaccagtctact

SEQ ID NO: 8287 - DNA, 471 bp, Homo sapiens
ctgaagggtacagccatttcatagggtcctctcagagagtatttggtttgctttcctaactttctaaaaatagtagattacacaggccacctccatctcatggctcaagaactcagaaaaggctggactatggatttaagcaatacacaggacacattttattaaagaagtcaggattattacaagttttctaaatttttttccgtttactctgtgagagaatgcaaatgatctagcggttaatggcatggaaacctcataacgctcccaaatttcagaacttcaagcatgagtcatacagttactttaacagttttaaaatatgtttttgatctattttagccacaagactgaatacaagaggactgctatctgaagggaaggattctaaatactgtacaaagaatcacatgtgtcagttataaatatatacacacacacgtaagaaacatgttttttaacataaatgct

SEQ ID NO: 8288 - DNA, 449 bp, Homo sapiens; identical to SEQ ID NO: 8278
  unsure (370): n=A,T,C or G
  unsure (388): n=A,T,C or G

SEQ ID NO: 8289 - DNA, 464 bp, Homo sapiens
ctgccagtttggagcattgccctctaagagctttaaaactatttttttacatgccttatatacattccactaatgacattcttataataatattaaacacatgaccttggtactaacatactcactgtgaacccagcctattgcaaaaataaaatctttttataatattatctatgggatgtcagcacaatataacactctgggaagaagtggagttttttggttattaggttaattttctagtaaaacacattgcctgttttcagttaacactggtaatgccattttaatatatggctttttcaaatcagttcagtgaaaatagtacagatttaggtttacataactactctgacatactggaattgcatatagagatgttcagtggtcgtttttcattttaagtaatttttgttttggcatttttttgtgtgaagtaaattaatcaactagagaggtgcaaa

SEQ ID NO: 8290 - DNA, 384 bp, Homo sapiens
ccacaacgtcaatattcctggttaccctacattagagtatgcttccaaagctgtgtgcataacatggaattctttagagtagccattactgcattttcccaagggaaatttgcaagaattggatacatcagaatttaatcagaaactaaagccatgtcttttcccagaacatgccccagacgtggtttttaattttttgttgttgttattttggttttttaacgaatatggtttttaactgacctataagacagtccatttaaatatataaatttttaatagccttccaggggccatttcctaaatcccacctgagaggattaaatgagacaacgtagccaaaccccaggcattctccccttaagaaccttgtttggggaatgg

SEQ ID NO: 8291 - DNA, 295 bp, Homo sapiens
ctgtggtggtgccttctggagaagagcagagatacacatgccatgtacagcatgaggggctgccgaagcccctcaccctgagatgggagccatcttcccagtccaccatccccatcgtgggcattgttgctggcctggctgtcctagcagttgtggtcatcggagctgtggtcgctactgtgatgtgtaggaggaagagctcaggtggaaaaggagggagctactctcaggctgcgtccagcgacagtgcccagggctctgatgtgtctctcacagcttgaaaagcctgagacag

SEQ ID NO: 8292 - DNA, 506 bp, Homo sapiens
cagaagtaagcctcatcatcagagcctttcctcaaaactggagtcccaaatgtcatcaggttttgttttttttcagccactaagaacccctctgcttttaactctagaatttgggcttggaccagatctaacatcttgaatactctgccctctagagccttcagccttaatggaaggttggatccaaggagggtgtaatggagcatcaagccactcggcggcagcatggagctataactaagcatcctttagggttctgcctctccaggcatttagccctcacattagatctagttactgtggtatggctaatacctgtcaacatttggaggcaatcctaccttgcttttgcttctagagcttagcatatctgattgttgtcaggccatattatcaatgtttacttttttggtactataaaagctttctgccacccctaaactccaggggggaaaatatgtgccaatcaatagcacccctactcacatacacacacacctagccag

SEQ ID NO: 8293 - DNA, 512 bp, Homo sapiens
  unsure (503): n=A,T,C or G
cctttgcatgttaaagctgtataatttgttgggttgtgagtggtctgacttaaatgtgtattataaaatttagacatcaaattttcctactaactaactttattagatgcatacttggaagcacagtcatatcacactgggaggcaatgcaatgtggttacctggtcctaggtttgaactgtcttatttcaaaagatttctgaattaatttttccctagaatttctccttcattccaaagtacaaacatactttgaagaatgaaacagattgttcccatgaatgtatgctcatactcgactagaaacgatctatgttaaatgactgtgtatatgaattatttcaagtactaccccaaataactttcttattgctctgaaagaagaaaagcaatgtaaatcactatgattattgcacaaacaaccagaattctccaacaattttaagtaatctgatcctcttcttggagaaaattgttacctaatagtttttccttatgaatgntattactac

SEQ ID NO: 8294 - DNA, 383 bp, Homo sapiens; identical to SEQ ID NO: 7947

SEQ ID NO: 8295 - DNA, 467 bp, Homo sapiens
  unsure (3): n=A,T,C or G
  unsure (7): n=A,T,C or G
  unsure (11): n=A,T,C or G
  unsure (17): n=A,T,C or G
  unsure (21): n=A,T,C or G
  unsure (29): n=A,T,C or G
canaaanttanctggtntggnggtgcacncccgtagtcccagctacttgggaggctgagacaggagaatcgcttgaacccaggaggcggaggttgcagtgagtggagactgagccactgaactccagcctgggtgacaaagtgagactctgtctcaaaacaaaaaacaaaaaacaaaaaaagaattagccaggcgtggtggcatgcgtctgtagttccagctacttgggaggctgaggcaggagaatgtcatgaacccaggaggtggaggttgcagtgagccaagattgcgccactgcactccagcctgggtaacagaatgagactccgtctcaaaaaaaaaaaaaaaaagaggaatgagaacatgtgaccacacaaagttttgtttatgaatgttcataataattttgtttttaatagccaaaaactgaaaataacccaactgcgcaacaatggttgaatggataa

SEQ ID NO: 8296 - DNA, 506 bp, Homo sapiens
  unsure (468): n=A,T,C or G
cctgccttaccgagagccaaacagagcccagggagactccgctgtgggaaacctcattgttctgtacaaagtactagctaaaccagaaaggtgattccaggaggagttagccaaacaacaacaaaaacaaaaaatgtgctgttcaagttttcagctttaagatatctttggataatgttatttctattttttatttttttcattagaagttaccaaattaagatggtaagacctctgagaccaaaattttgtcccatctctaccccctcacaactgcttacagaatggatcatgtcccccttatgttgaggtgaccacttaattgctttcctgcctccttgaaagaaagaaagaaagaagactgtgtttttgccactgatttagccatgtgaaactcatctcattacccttttctgggtttgaagctgctgtctctagaagtgccatctcaattgtgctttgtatcantcagtgctggagaaatcttgaatagcttatgtacaaaa

SEQ ID NO: 8297 - DNA, 477 bp, Homo sapiens
  unsure (463): n=A,T,C or G
  unsure (470): n=A,T,C or G
ctgctttccccagaccagggggtccaatggctgcaatgtacccaaatggaatgttgcccccttaaacaccattttccctccaggaccaccttggtttctaggcactgtggttcttggcaggggctgtcttaggtaaaagggtagttgtggagctacagtctgaagaacatagcttgggctcaagttcaaatgagccatctttttcctttgcgtttttcttgactgaaggtgagatgttatttgtggcatgtgaactgtggcaggtgggaataatcctgcccttgagagaaaggatctccagcctcccagaagcctgctgtgctttcgtcccacagctttctgcccattgtttcttactagtttcttgaattgttcttgtggacttttcctcagggatacattggcctgcaggtcccagttcacatgtagtcccctgctcaccattggagaatcagctcactgntctctanaaacgtg

SEQ ID NO: 8298 - DNA, 546 bp, Homo sapiens
  unsure (472): n=A,T,C or G
  unsure (494): n=A,T,C or G
  unsure (504): n=A,T,C or G
ctgtcaacctttctttaactgaggaaacatttgagggctctgctgatgttctggctagctacactcaggcaacacatgatgaatcaatgacttatgaagatagaagccaactagatcacatgggctttcacttcacaactgggatccctgctcctagcacagaaacagaattagacgttttacttcccacggcaacatccctgccaattcctcgtaagtctgccacagttattccagagattgaaggaataaaagctgaagcaaaagccctggatgacatgtttgaatcaagcactttgtctgatggtcaagctattgcagaccaaagtgaaataataccaacattgggccaatttgaaaggactcaggaggagtatgaagacaaaaaacatgctggtccttcttttcagccagaattctcttcaggagctgaggaggcattagtagaccatactccctatctaagtattgntactacccaccttatggatcanagtgtaacanaggtgcctgatgtgatggaaggatccaatcccccatattaca

SEQ ID NO: 8299 - DNA, 326 bp, Homo sapiens
ctgagaccaaaattttgtcccatctctaccccctcacaactgcttacagaatggatcatgtcccccttatgttgaggtgaccacttaattgctttcctgcctccttgaaagaaagaaagaaagaagactgtgtttttgccactgatttagccatgtgaaactcatctcattacccttttctgggtttgaagctgctgtctctagaagtgccatctcaattgtgctttgtatcagtcagtgctggagaaatcttgaatagcttatgtacaaaactttttaaattttatattattttgaaactttgctttgggtttgtggcaccctgg

SEQ ID NO: 8300 - DNA, 512 bp, Homo sapiens
ctgcctttcctgggagccactttgattccactgaacgcccttcctgccctttccacttttggttccaaagccctccctagtttccatcagaggttctacaacatgaaaataagtcccacctcacagatttgttccacgtaacatgcccctactgatggtcattggattactctcttccattgcaaaataaattcagaatcagacttttctggggttgaattttattcctgactgtgacatgagctaggaaaagtcagttcacctctctgagagtgttttcccatacttgaaattgggggggagagataaagtcaataatcattagcattattacggggataaaataagctaatttgtgtaaagtgtttaatgtgatgcctggaaaagcataagtgcttgacaaagagtagctattactggggcaattattatgacttttgttatcatcgttattgaaaacttattgcttgagcacaatctgggctaagtaggaaactaagtgaatgtgatgc

SEQ ID NO: 8301 - DNA, 580 bp, Homo sapiens
ctggtgagaggaggagttagagctggtcgttttgtgattacccataatattggaagcagcctgagggctagttaatccaaacatgcatcaacaatttggcctgagaatatgtaacagccaaaccttttcgtttagtctttattaaaatttataattggtaattggaccagttttttttttaatttccctctttttaaaacagttacggcttatttactgaataaatacaaagcaaacaaactcaagttatgtcatacctttggatacgaagaccatacataataaccaaacataacattatacacaaagaatactttcattatttgtggaatttagtgcatttcaaaaagtaatcatatatcaaactaggcaccacactaagttcctgattattttgtttataatttaataatatatcttatgagccctatatattcaaaatattatgttaacatgtaatccatgtttctttttcaaatctaaagttaaaaaaaaaatagcagaagccagtgtcttaaagtctatcttttgtttctaagaccatgggatttcataatctcaagataaaatatgtatgaag

SEQ ID NO: 8302 - DNA, 457 bp, Homo sapiens
  unsure (417): n=A,T,C or G
ctggtcctaacttttatacaaagtgaaactatatagagctcctttgccaacataaggagctacataatttctattacacttgcctaggcatgagaaacgcaaaagcaactcaaaaggagcaagtccaggaaaagaaaagctatgaaggagagaaagactagcagatgaaacacatactctgaaaaactccaatctgccattcaagtattggaaataccccaaaggggacaatgaatgggatctattacaacaaagtcagcaaagtaaaatgcaaatctcacacatgataaatggccctgataggctgtttgctgaaagacctaaggctagtgattcagtccacaattccttctggaccctaaagaaggggttcatataaaagtcatacttgtctttttgcaattttctcttggttgncttcagagaatagtcatttgcttctttcattcaggttatg

SEQ ID NO: 8303 - DNA, 456 bp, Homo sapiens
  unsure (198): n=A,T,C or G
  unsure (293): n=A,T,C or G
cctatgtatggtggattacattttgcacatctcgacattgttttcattgtttccacaaaaattctgcctgtctcgtcagagtgctttgattaagcattactggttatggcaaacttgaactatataattgttatttgtattacaacatccatatggcttcttactatttttaaaattgttattaagagtgtacactangtatttgtgggttcatgtgagaaaataacaagcatttaaaaaactctttccatgaaaaaataaattctggattttccaacataactttaaaacanaattttgggatgcaaattattcataagctgcagtgtgacggtattcctgggaacataatggtatgttagagtctttactcaaaagcaagacacccagtgacaaggcacattcaagctcttctgttaagatcccgctcaagtgttttctcctttgtgaagtatt

SEQ ID NO: 8304 - DNA, 571 bp, Homo sapiens
  unsure (4): n=A,T,C or G
  unsure (5): n=A,T,C or G
  unsure (9): n=A,T,C or G
  unsure (17): n=A,T,C or G
  unsure (559): n=A,T,C or G
  unsure (560): n=A,T,C or G
aganntgtnatacgacncactatagggcgaattgggccctctagatgcatgctcgagcgctgagagatcccctcataatttccccaaagcgtaaccatgtgtgaataaattttgagctagtagggttgcagccacgagtaagtcttcccttgttattgtgtagccagaatgccgcaaaacttccatgcctaagcgaactgttgagagtacgtttcgatttctgactgtgttagcctggaagtgcttgtcccaaccttgtttctgagcatgaacgcccgcaagccaacatgttagttgaagcatcagggcgattagcagcatgatatcaaaacgctctgagctgctcgttcggctatggcgtaggcctagtccgtaggcaggacttttcaagtctcggaaggtttcttcaatctgcattcgcttcgaatagatattaacaagttgtttgggtgttcgaatttcaacaggtaagttagttgctagaacccatggctcctttgccgacgctgagtagattttaggtgacgggtggtgacaatgagtccgtgtcgagcgctgnntttttcggcct

SEQ ID NO: 8305 - DNA, 376 bp, Homo sapiens
cctaggtgtcggctgggcattgcctacacgtgaagagatcactccgcgtccccactgcacctgtcacaaagtgccttctgatatgcctggcaaaccaaaatcggtgagcgccagcttgcttccctagaagacatttctaaatattcataacatgcttgctcaaatcaatcaccttattttacatccgctccagggagaaatgaagacatggtcctacgttgttctgtaattattttctatgtaaattttgttccttgtcacaattatatatgtcttaggggaaaggaccatttcacatgtgtcacctcatgtgattctcaccacagccctgtgattgctcctgttttataaataatgacatagttccagttgatgg

SEQ ID NO: 8306 - DNA, 316 bp, Homo sapiens
ctgagactgcccagtataggaagaagcagaagatatgtaaggggtgttagggtaagcgtttgaagtaggaggagcaacaggctgctgaggtcgatacattgctgacccccctgttccgaagggatacggctgggctggttgataaggctgtggctgtggataaggtggtacctgggtgtgcatatgacctggagatgtgggaagctgaccagcagcatttggattaacatttccatgcattatgaaacccggaggtggaggattttctccatggggataatattgttgagtttgaactcttggcatctggtggtgg

SEQ ID NO: 8307 - DNA, 508 bp, Homo sapiens
  unsure (438): n=A,T,C or G
  unsure (444): n=A,T,C or G
ctgcacatggattggttaacataatatatactgctatataatcttttaagggctaatatttgtagataatttaaaagcatgtcaatttcctctaagatttgattatttaacctgcacaaaggccaatcttcagttatcaatgacaagaaaactctagggctgccaaaataacttcattttagaccccagagttagtgttaggctggtaatgtttctaatttgggaataatgagactagaaagctaggagggccccctccaaatttctcccttgtattaggctgaagtagaacataacgtggcttaaagcataaacttaaagcatatgctttgagttttaaaaatgttaacctgtaattaattattagagtattatccatagtctactatgatagtcagttaatattctctaaatcagattatattcatttgaaaatgnatttgnatatttgcaaatgtgttattacacaagatcttacctatgtcaatttaaagaggttaaagatgca

SEQ ID NO: 8308 - DNA, 378 bp, Homo sapiens
ctgggaggtaaatggtgactgtatttccaaagaagctcttttgattcagaactccaggagaccctgacatgaaaaccttaaagcaaatgactgtcacatgcttcaaggagtttatgtcaagacagttctacttatgtaaagtaagattataaaatgaaagagagtgtataaagaaaatcctaaggaatccactaaaaaacaactagaacgaagaggcaagttcagcaaggttgcaagatacaagacctatatataaaaatcaattgcatttctgtacacttgtaataaacaatcaaaaaaattaagaaaattacatttgcatttgcatcaaaaatagtaaaatatttacaagtaaatttaacaaaagaactgcaaaac

SEQ ID NO: 8309 - DNA, 297 bp, Homo sapiens
cctgggtatctgaggcttgcttggcttgtgtccatgcttaaacccacggaagggggagactctttcggatttgtagggtgaaatggcaattattctctccatgctggggaggaggggaggagggtctcagacagctttcgtgttcatggtggcttggctttgactctccaaagagcaataaatgccacttggagctgtatctggccccaaagtttagggattgaaaacatgcttctttgaggaggaaacccctttaggttcagaagaatatggggtgctttgctcccttggacacag

SEQ ID NO: 8310 - DNA, 437 bp, Homo sapiens
ccttgcttatccaagagtcaaaatggaaattaccacacctactacagttgcctgagaattataacaccatttttcagtactaccacagaaaaacctgtagtgtctgcaccaaggttcctaaagatcctgctgtttgccttgtgtgtggtacttttgtatgcctgaaaggactttgctgcaagcaacaaagttactgtgaatgtgtactgcactctcagaactgtggtgcaggaacaggtattttccttttgatcaatgcatcggtaattatcatcattcgaggtcaccgcttctgcctctggggttccgtgtatttggatgctcatggagaggaacaccgggatcttaggcgaggcaaacctctctacatttgtaaggaaagatacaaagttcttgagcaacagtggatttctcatacttttgatcacatcaataaa

SEQ ID NO: 8311 - DNA, 254 bp, Homo sapiens
ccagggagcctctactcattttgagaattcctttgagggttcatcatttgcagtgggtgacattgccctggcactgtactcagctctgttctcctactcaggctgggacaccctcaactatgtcactgaagagatcaagaatcctgagaggaacctgcccctctccattggcatctccatgcccattgtcaccatcatctatatcttgaccaatgtggcctattatactgtgctagacatgagagacatcttgg

SEQ ID NO: 8312 - DNA, 433 bp, Homo sapiens
ctgcttctgatttgcacccaaaatggcaccacccaaaaaaacacaacctatgtcgggttcggatttttaagaagttatttcagttaagcagacactaaagtacaattatacttggcttcttgtggcataaatgatcttgaattttaagatcatttggcttttacctatttagaacaaaacagtctatattttcctgtacttagaagttggaaatgaaataatttttaaagcccacaggagattaatttgtactaagtcattactatgtatcaggcattgtgcttggtgctttctagtcactgaaggagtattaaatatgtgaaatgcctgtcacagtgacttgcatgtggcaatcactcaaagatccccttctttaaccaatgtggtgaggttgtagtattattataaatttttaattatataacaactgagg

SEQ ID NO: 8313 - DNA, 449 bp, Homo sapiens; identical to SEQ ID NO: 8036

SEQ ID NO: 8314 - DNA, 515 bp, Homo sapiens
  unsure (500): n=A,T,C or G
ccaacatggtgaaaccccgtctctactaaaaatacaaaaaaattaggcaggcatggtggcacactcctataatcccagctactcggtaggctgaggcaggaggattgcttgagcccgggaggtggaggttgcagtgagccaagatcgtgccactgcactccagcctggctgacagagcgactctgactctaaataaataaatacatacatagatacatggtaacttagttccctctctttcttttgtattgacaccagatttactcaatactgttttagtttgtcagtccaataagatgagaaaataagtatgagatgcaacttggaattaaagtgatcaaatgtttgctctgacagataagcttcagcacctgttaacttggagaatcaagtgaaactccaccggcttcatgtggaagctcgtcaggcagcatcacaacatgtacataacccaagagccgttctgtacaaggttctccttaaaatataatgggaggccnggcgcggcggctcat

SEQ ID NO: 8315 - DNA, 442 bp, Homo sapiens
  unsure (354): n=A,T,C or G
attttgagtacattgaagagaacaagtatagcagagccaaatctcctcagccacctgttgaagaagaagatgaacacttcgatgacacagtggtttgtcttgatacttataattgtgatctacattttaaaatatcaagagatcgtctcagtgcttcttcccttacaatggagagttttgcttttctttgggctggaggaagagcatcctatggtgtgtcaaaaggcaaagtgtgttttgagatgaaggttacagagaagatcccagtaaggcatttatatacaaaagatattgacatacatgaagttcgtattggctggtcactaactacaagtggaatgttacttggtgaanaagaattttcttatgggtattctctaaaaggaataaaaacatgcaactgtgagactgaagattatggagaaaagtttgatgaaaatga

SEQ ID NO: 8316 - DNA, 140 bp, Homo sapiens
ctgtcactttgcgggggtagcggtcaattccagccaccagagcatggctgtaggggcgatctgaggtgccatcatcaatgttcttcacgatgacagctttgcgtccggagtagcgtccagccaggacaagcaccaccttc

SEQ ID NO: 8317 - DNA, 386 bp, Homo sapiens
catcggtgctgaaattgagcattttaaatagtacagtaggctggtatacattaggaaatggactgcactggaggcaaatagaaaactaaagaaattagataggctggaaatgcttactttctgctctcattttctttcattttgtctgctgtctttttgaatgccaatactttcatttaaaatgttttgggagcacggcaacccaaaatgactgaacggtggtccaaaaatccaaaccaactgataattacttctcgaggtgataggaaaggcacaggaagttaggactttggctgaaatgatgaaaacacatgttcgccattttagggatcagcgcctcgactcctgccacctccggctccaacgatgatcatgtttggatgtat

SEQ ID NO: 8318 - DNA, 451 bp, Homo sapiens
  unsure (14): n=A,T,C or G
  unsure (347): n=A,T,C or G
gaggtctgcagggncaggtctgcatagcagaggtcgccctccaggggctgcagtacctgctctggggacatcccggctgctttctgctggtacttcatcatcctccaagccaagagtgaggcggccaccaaaagcagcagcaatatggtgaagatgaggggcaggaggacactgagcttcaggagcttgtgcctgttgtccaagtggtggccggtcagagttggggagctgctagtttcttcttgggtgactggtgctgggtcaatggtcacttgaactgtgaccccaaggtcatttccagttttctcaattccacaccagtaagtgtcagcatcagttttcatganatcctccatggtcacagtgaacgtgcggtttttctgattgtccttgatggacacccggtccctcttcacctcctgctctgacccactggttttaacaaggatct

SEQ ID NO: 8319 - DNA, 280 bp, Homo sapiens
  unsure (221): n=A,T,C or G
  unsure (240): n=A,T,C or G
  unsure (242): n=A,T,C or G
  unsure (250): n=A,T,C or G
  unsure (254): n=A,T,C or G
  unsure (259): n=A,T,C or G
  unsure (270): n=A,T,C or G
  unsure (277): n=A,T,C or G
ccaccttatatataattatatattctaccataaatgctggccttcttcaaattatgattttggaaaatctaacccatacagagggataaaaaattgacatcccttggacaacttctccttgtttttttttgttttgttttgtttttaacattccaagctctctctggtcccctatccaaggagaaatgctagggcctcgaggatgtcgctatatatttttntaactaaatgataaatttntnttcaaatngttngaatncgtttccaaanctttcanagt

SEQ ID NO: 8320 - DNA, 308 bp, Homo sapiens
cctagagatcgttcagggtgttgtaactgggaacatctgaatgctgaggcttagtccagtgttctctctcccttaccactcctcttccccttccctctataatggcagtacccagggcccggtccatagactactatcgagtgctcctatgtgcatcttagtacgtatcattttcccttgcctttttccttctatcctttcagtggtagcaactgcccttgctaatcaccgtaacctcggctgagaaagaagaggaagcgaaatccaagatgcagctcagttcatcaaagcctagcaggtcccctcag

SEQ ID NO: 8321 - DNA, 556 bp, Homo sapiens
ctgtatacttactggtttagcatccctaatccaaaaacctataatttgaaatgtttcaataaacatttcctttgaatatcatgtgggcgctcacacagtgttggattttagagcatttcaaaattcgaatttttggattaaggattctcagcctgtaaacctagagttcttgactcaaatggactttcagtaccctttcctcaaccttcccacactcccgaccatacacatgtacctgcccacagacattcatacagtttccttattttaatgtcctgggaagaggtagaaacatcttgtcaaagtcactctttcagtggtgggcatctgcgctctaccatctggctgctcaaatgaaaatcgaaccttgcggaaaatttcctccacatcacaggaacaggcatattcttgcatatgttcaatgagtcttccaataaaaacagagcccattgtgggatgtctccaagaaacattatctggtgtggaagagcagaaagcgataaaatccttctctatgtgggctttcttaatagcatcatcctcaaactcttctgta

SEQ ID NO: 8322 - DNA, 192 bp, Homo sapiens
ttaaatgatgttttattagataaatttcaatcagggtttttagattaaacaaacaaacaattgggtacccagttaaattttcatttcagataaacaacaaataattttttagtataagtacattattgtttatctgaaattttaattgaactaacaatcctagtttgatactcccagtcttgtcattgccag

SEQ ID NO: 8323 - DNA, 494 bp, Homo sapiens
  unsure (434): n=A,T,C or G
gactcagactcctcatttgtaaattggaaatactttcgtatctttctaattcattgatgtgacaaactgagatagcacaaataaagcccttgcataaaacaattgatcaattaaatgtaactattgtaactatcaacattatcattttaaccaagtgaggtctgccaacaaggtattattacctccatttcatgaattaagacctgagcctcaaagcacttgaatgacttgcccacaatcacacaagtaaatggagacactggcttagactttggttttcactctcccagggagttcactgtcacatattgtgtgagttcatttaagcttctccaggagcctgctgatgatttctaaaaagtttatagagtccagaagaagactggggtctgacaatcccgtgagtagagaatgaatcagaaagaaatgtctanttttagttacagtcacttctgtggttccacaggctggaaaaatagcaattactttagtgt

SEQ ID NO: 8324 - DNA, 326 bp, Homo sapiens
ccagtggtgggttagaggcaggcaagggtgggagcagagatgggtgaatgggaggacatggggaaaccagtcagatggcatcacccattgggaggcagcatcttaccctttaaaaaacaaacatcagttgcatggaggaacagaaatattaagactatgtaatttaatctcaagaggttactagggtgtgctccaaatatattccgatgctgctgaaattaatcagaaagggaacagttcccagctactatcccatctgcctcaagtagaccaccctaattccttgatcctgtgcttcaagttgttagaaaaccattcaaaaaaag

SEQ ID NO: 8325 - DNA, 247 bp, Homo sapiens
cctctcccacttcgactgaggaggagcaggtgatgcttagaaatgaccaggacaccctcatggcccggtggacagggagaaacagccgatcttccctgcaggtggactggcacgaggaggagtgggagaaagtgtggctgaacgtggacaagagcctagagtgcatcattcagcgtgtggacaagctgctgcagaaggagcggctgcatggcgagggctgtgaggatgtcttcccctgtgcaggcag

SEQ ID NO: 8326 - DNA, 413 bp, Homo sapiens
ttggtcaccacagtgacagaaattgctggataagcgaagtgccactgggttctttgccctcccttcacaccatgggataaatctgtatcaagacggttcttttctagatttcctctacctttttgctcttaaaactgcttctctgctctgagaagcacagctacctgccttcactgaaatatacctcaggctgaaatttggggtgggatagcaggtcagttgatcttctgcaggaaggtgcagcttttccatatcagctcaaccacgccgccagtccattcttaaggaactgccgactaggactgatgatgcattttagctttgagcttttgggggttattctaccaacaaacagtccattggaaagaaaacagtccctggaattaacagatcagaatgttcacactggttaa

SEQ ID NO: 8327 - DNA, 426 bp, Homo sapiens
  unsure (40): n=A,T,C or G
  unsure (262): n=A,T,C or G
  unsure (407): n=A,T,C or G
ccggtgagttgggtgccggtggagtcgtgttggtcctcanaatccccgcgtagccgctgcctcctcctaccctcgccatgtttcttacccggtctgagtacgacaggggcgtgaatactttttctcccgaaggaagattatttcaagtggaatatgccattgaggctatcaagcttggttctacagccattgggatccagacatcagagggtgtgtgcctagctgtggagaagagaattacttccccactgatggagcccancagcattgagaaaattgtagagattgatgctcacataggttgtgccatgagtgggctaattgctgatgctaagactttaattgataaagccagagtggagacacagaaccactggttcacctacaatgagacaatgacagtgganagtgtgacccaagctgtgt

SEQ ID NO: 8328 - DNA, 178 bp, Homo sapiens
  unsure (8): n=A,T,C or G
  unsure (12): n=A,T,C or G
  unsure (15): n=A,T,C or G
  unsure (65): n=A,T,C or G
  unsure (74): n=A,T,C or G
  unsure (93): n=A,T,C or G
  unsure (108): n=A,T,C or G
  unsure (131): n=A,T,C or G
  unsure (132): n=A,T,C or G
  unsure (139): n=A,T,C or G
  unsure (142): n=A,T,C or G
  unsure (148): n=A,T,C or G
  unsure (160): n=A,T,C or G
  unsure (161): n=A,T,C or G
  unsure (165): n=A,T,C or G
  unsure (171): n=A,T,C or G
ccaatgancatntcntacagaaggaccccgaaagaccaccagtccacagagaatgtgtacttcangccctgtangatctcaggggcgatatantcaggggtgccgcancaaggtgctggcccggctctccnngaatatnttntctttncacatcccaaanncggnaatctngatgtgg

SEQ ID NO: 8329 - DNA, 269 bp, Homo sapiens
  unsure (38): n=A,T,C or G
  unsure (43): n=A,T,C or G
  unsure (68): n=A,T,C or G
  unsure (73): n=A,T,C or G
  unsure (76): n=A,T,C or G
  unsure (88): n=A,T,C or G
  unsure (105): n=A,T,C or G
  unsure (186): n=A,T,C or G
  unsure (187): n=A,T,C or G
  unsure (206): n=A,T,C or G
  unsure (221): n=A,T,C or G
  unsure (231): n=A,T,C or G
  unsure (260): n=A,T,C or G
  unsure (261): n=A,T,C or G
  unsure (265): n=A,T,C or G
gtaatcccttccttttactacattttaattaccagggncacanaaatataaatggaaaaaaaacttantgccnganaaagtaaagcgngtatagacattctgttntatttaaaaataaatatcacctcttacaattagtgttgaatttttggaagacaatttgtgagactttcaaaatttattgtnncaatattagtattctgatngtaattttatatganagctttgcanaacgttaacattgggagaaactgggcaanntgtnaagg

SEQ ID NO: 8330 - DNA, 328 bp, Homo sapiens; identical to SEQ ID NO: 8110

SEQ ID NO: 8331 - DNA, 431 bp, Homo sapiens
  unsure (319): n=A,T,C or G
  unsure (405): n=A,T,C or G
  unsure (426): n=A,T,C or G
agctggtccagcagctcgagcagtgggagttccgagtctgtggagtttttcttgttgattctcagttcatggtggagtcattcaagtttatttctggcatcttggcagccctgagtgccatgatctctctagaaattccgcaagtcaacatcatgacaaaaatggatctgctgagtaaaaaagcaaaaaaggaaattgagaaatttttagatccagacatgtattctttattagaagattctacaagtgacttaagaagcaaaaaattcaagaaactgactaaagctatatgtggactgattgatgactacagcatggntcgatttttaccttacgatcagtcagatgaagaaagcatgaacattgtattgcagcatattgattttgccattcaatatggagaanacctagaatttaaagaaccanaggaa

SEQ ID NO: 8332 - DNA, 366 bp, Homo sapiens
  unsure (252): n=A,T,C or G
  unsure (255): n=A,T,C or G
ccaacatggtgaaaccttgtctctactatttttacaaaagttagtcggacgtacagacgggtgcctgtagtcccagctacttgggaggctgaggcaggagaatttgtttgaacccagaggtgaaagttgcagggagccgaggttgtgccactgcactccagcctgggagacagagcgagactgtctccaaaacaaacaaacaaacaaacaaacaaaaaaaccctgtagcttgggatcagccttctcttctgntgnttttctttaaaaaataaaaattaaaaataggcttcaagtgatcctcccgccatgacctccaaaactgctgggattgtaggtgtgagcactgcacccagccgtatgtttttt

SEQ ID NO: 8333 - DNA, 395 bp, Homo sapiens
  unsure (370): n=A,T,C or G
ctggacaggttgattataccaaggcttgggaagagtactacaagaaaatgggtcaggcagttcctgctccgactggggctcctccaggtggtcagccagattatagtgcagcctgggctgagtattatagacaacaagcagcctattatgcccagacaagtccccagggaatgccacagcatcctccagcacctcaggtataattgccttcccagaccttccaccttaggttctgctgcaaaaagcaccagtgctgaagatgctgcaagcaccaaatcatagctcataaaatcaggtcctgagatagttacccataaagaggaatcctttgagtgtatgccattggtgagccgatgagcatggaccatanaagggctcaatgtagaaggtaaaat

SEQ ID NO: 8334 - DNA, 454 bp, Homo sapiens
  unsure (273): n=A,T,C or G
ctggtttcaaagatccccttctggcctctggaacagatggcgttggaactaaactaaagattgcccagctatgcaataaacatgataccattggtcaagatttggtagcaatgtgtgttaatgatattctggcacaaggagcagagcccctcttcttccttgattacttttcctgtggaaaacttgacctcagtgtaactgaagctgttgttgctggaattgctaaagcttgtggaaaagctggatgtgctctccttggaggtgaaacagcanaaatgcctgacatgtatccccctggagagtatgacctagctgggtttgccgttggtgccatggagcgagatcagaaactccctcacctggaaagaatcactgagggtgatgttgttgttggaatagcttcatctggtcttcatagcaatggatttagccttgtgaggaaaatcgtggcaaa

SEQ ID NO: 8335 - DNA, 346 bp, Homo sapiens
ctgactgtaacctccgcctcctgggttcgagattctcctgcctcagcctcccaagtagctgggattacgggcgcccgccaccacgcccggctaattttttgtatttttagtagagacagggtttcaccgtgttagccaggatggtctcgatctcctgaccttgtgatccacccacctcggcctcccaaagtgctgggattacaggcgtgagccactgcgcccggccacattcagttcttatcaaagaaataacccagacttaatcttgaatgatacgattatgcccaatattaagtaaaaaatataagaaaaggttatcttaaatagatcttaggcaaaataccag

SEQ ID NO: 8336 - DNA, 431 bp, Homo sapiens
  unsure (245): n=A,T,C or G
  unsure (272): n=A,T,C or G
  unsure (342): n=A,T,C or G
  unsure (344): n=A,T,C or G
  unsure (361): n=A,T,C or G
  unsure (383): n=A,T,C or G
  unsure (401): n=A,T,C or G
  unsure (430): n=A,T,C or G
cactactgtgggttttactccttgccggatattgatccaaaagaataattgaagcaatgaaactatagaatttatctccaggatgtggtcagcacacaatattcatgcctcctttgttaaataagagacgtgttttccaagtctaatgttgccaaaaagactacgtcagtgctttctgtggaatggaactcttatttcaacagtaagtctgaatcatgaccatttatttatttaacagatattgngacaataaattatctgccaggaactgngcaatgcattgctaattcaaagacaagacatagaccctctcttacaggacttctctctctggaggagcananaggcttgtaaatatacnataagtaaaaacataacaagtntgattagagaggaatgcntaaggagttgtagaagcagggatagagana

SEQ ID NO: 8337 - DNA, 336 bp, Homo sapiens
  unsure (238): n=A,T,C or G
  unsure (309): n=A,T,C or G
  unsure (310): n=A,T,C or G
  unsure (314): n=A,T,C or G
  unsure (319): n=A,T,C or G
  unsure (321): n=A,T,C or G
  unsure (334): n=A,T,C or G
ctgggagaggagcagagccctgggatgagactgattgattcagaccagatggatggcctcacataggtgtgacaaaaatagtaacacattgcagacattccaggaactgtcctcttctcctggcctggaggtgggtcgcctgtgttgtctccttatctacctcttatgtgcttccgaatcaaagaatgtcaatgatgctaactcttttccatgttagcacctggtcacaaggcatcanacttgaagttccattaaaaaagtctaatgaccattgcccaagtttccctgtaggtaaagccaaagcaaatnntttngcctncngcctaaatatgtngt

SEQ ID NO: 8338 - DNA, 370 bp, Homo sapiens
  unsure (66): n=A,T,C or G
  unsure (75): n=A,T,C or G
  unsure (89): n=A,T,C or G
  unsure (97): n=A,T,C or G
  unsure (107): n=A,T,C or G
  unsure (120): n=A,T,C or G
  unsure (156): n=A,T,C or G
  unsure (161): n=A,T,C or G
  unsure (177): n=A,T,C or G
  unsure (180): n=A,T,C or G
  unsure (197): n=A,T,C or G
  unsure (204): n=A,T,C or G
  unsure (207): n=A,T,C or G
  unsure (215): n=A,T,C or G
  unsure (220): n=A,T,C or G
  unsure (230): n=A,T,C or G
  unsure (239): n=A,T,C or G
  unsure (245): n=A,T,C or G
  unsure (261): n=A,T,C or G
  unsure (268): n=A,T,C or G
  unsure (272): n=A,T,C or G
  unsure (289): n=A,T,C or G
  unsure (294): n=A,T,C or G
  unsure (304): n=A,T,C or G
  unsure (309): n=A,T,C or G
  unsure (314): n=A,T,C or G
  unsure (354): n=A,T,C or G
  unsure (364): n=A,T,C or G
ccattgttgagcccagtgagagacatttctaccagccaatctggacactggtgggtgctggtgccnaacaattgncctcatctggtcgncccacggnaagtgtgatnccatctggtgtanaatggatcaaagctagagtgactgagttgaacccanacaanaactgcattcacacanatnacgacgaaaagatctcntaccganatnttattatngctcncggaatccanccacagcanctcggncctgagagcctgtcancccgtangtcngggcaaacaggttggcngcagncatcacatantccanatgcnggggattgttgacatcaaaggtgagcgggtgtggacagcntttgggcccngaccag

SEQ ID NO: 8339 - DNA, 230 bp, Homo sapiens
ctgcggaagcccagacaccaggaaggtgagatcttcgacacagaaaaagagaaatatgagattacggagcagcgcaagattgatcagaaagctgtggactcacaaattttaccaaaaatcaaagctattcctcagctccagggctacctgcgatctgtgtttgctctgacgaatggaatttatcctcacaaattggtgttctaaatgtcttaagaacctaattaaatagc

SEQ ID NO: 8340 - DNA, 525 bp, Homo sapiens
  unsure (392): n=A,T,C or G
  unsure (396): n=A,T,C or G
  unsure (461): n=A,T,C or G
  unsure (474): n=A,T,C or G
  unsure (524): n=A,T,C or G
caagacctttggaaagatgaaacctcgttatgaaatcaactccctgattagataccactgcaaagatggtttcattcaacgtcaccttccaactatccggtgcttaggaaatggaagatgggctatacctaaaattacctgcatgaacccatctgcataccaaaggacttattctatgaaatactttaaaaattcctcatcagcaaaggacaattcaataaatacatccaaacatgatcatcgttggagccggaggtggcaggagtcgaggcgctgatccctaaaatggcgaacatgtgttttcatcatttcagccaaagtcctaacttcctgtgcctttcctatcacctcgagaagtaattatcagttggtttggatttttggaccaccgntcantcattttgggttgccgtgctcccaaaacattttaaatgaaagtattggcattcaaaaagacagcngacaaaatgaaangaaaatgagagcagaaagtaagcatttccagcctatctaatttctttagnt

SEQ ID NO: 8341 - DNA, 486 bp, Homo sapiens
  unsure (361): n=A,T,C or G
gcagtgagccgagatcatgccgttgcaccccagctcaggtgacagcgtgagactctgatgcaaaaataaataaagaaataaaagaaaaggaagagagaaggcagcattagatggctgatgttatggcttcgtgaaacagtttatggcataaagaaataactccccaactccttagttttccaagtatgtaaatgtttctgctcatccaaacactagcataggtaagtgaggacacatatttcatctagcccaaatatattttttaaaagaatccctgcagattttttgcttctataaaaaatatcccaacccaaatttctaaaaattttgatttttggaattaaatgataatactaattancatttacctatacatccttttctattttaaaatcattgcataatctggcatttatatttaattttctaaatcattttccctagagagcattcatgtaattttagaacttggaaggaaccaggatt

SEQ ID NO: 8342 - DNA, 368 bp, Homo sapiens
  unsure (114): n=A,T,C or G
  unsure (223): n=A,T,C or G
  unsure (294): n=A,T,C or G
  unsure (298): n=A,T,C or G
  unsure (326): n=A,T,C or G
  unsure (346): n=A,T,C or G
  unsure (354): n=A,T,C or G
cctccaggcttctagagcagctagcttgggctggattctcacacccaggctgccccttggattgttctacccaagcttttccctggggtctgggctcactccataaggtaaggngccttttaccttatggtccttctttagcaggtaacaaaggagcatcaggggcaggctgccctggtggcatcacactggctagtgaggccgtgaatatcttgtcccccancagggccgacagtttctatcacagaaaacagtgtgttcagtggtgaaaatcgttgcatgcatgttttcatntgancgtgtccttctcccatactccctatcanccagccctgcctgtagctgntgtatggngattgcacttggac

SEQ ID NO: 8343 - DNA, 384 bp, Homo sapiens
  unsure (234): n=A,T,C or G
  unsure (289): n=A,T,C or G
  unsure (294): n=A,T,C or G
  unsure (304): n=A,T,C or G
  unsure (321): n=A,T,C or G
  unsure (331): n=A,T,C or G
  unsure (337): n=A,T,C or G
  unsure (344): n=A,T,C or G
agaaaaagggccgttctgccatcaacgaagtggtaacccgagaatacaccatcaacattcacaagcgcatccatggagtgggcttcaagaagcgtgcacctcgggcactcaaagagattcggaaatttgccatgaaggagatgggaactccagatgtgcgcattgacaccaggctcaacaaagctgtctgggccaaaggaataaggaatgtgccataccgaatccgtgtgcggntgtccagaaaacgtaatgaggatgaagattcaccaaataagctatatactttggntaccnatgtacctgntaccactttcaaaaatntacagacagncaatgnggatganaactaatcgctgatcgtcagatcaaataaagttattaaat

SEQ ID NO: 8344 - DNA, 508 bp, Homo sapiens
ctaatatcataaataaggttgtttaagacgtgcttcaaatatccatattaaccactatttttcaaggaagtatggaaaagtacactctgtcactttgtcactcgatgtcattccaaagttattgcctactaagtaatgactgtcatgaaagcagcattgaaataatttgtttaaagggggcactcttttaaacgggaagaaaatttccgcttcctggtcttatcatggacaatttgggctagaggcaggaaggaagtgggatgacctcaggaggtcaccttttcttgattccagaaacatatgggctgataaacccggggtgacctcatgaaatgagttgcagcagaagtttatttttttcagaacaagtgatgtttgatggacctctgaatctctttagggagacacagatggctgggatccctcccctgtacccttctcactgccaggagaactacgtgtgaaggtattcaaggcagggagtatacattgctgtttcctgttgggc

SEQ ID NO: 8345 - DNA, 273 bp, Homo sapiens; identical to SEQ ID NO: 7855

SEQ ID NO: 8346 - DNA, 555 bp, Homo sapiens
tggagacgacattgaaaatgaaattcttatctctggacttacagggagaccccagagagagtcaaccccttctgggcactgtgattgatgggatgctgctgctgaaaacacctgaagagcttcaagctgaaaggaatttccacactgtcccctacatggtcggaattaacaagcaggagtttggctggttgattccaatgcagttgatgagctatccactctccgaagggcaactggaccagaagacagccatgtcactcctgtggaagtcctatccccttgtttgcattgctaaggaactgattccagaagccactgagaaatacttaggaggaacagacgacactgtcaaaaagaaagacctgttcctggacttgatagcagatgtgatgtttggtgtcccatctgtgattgtggcccggaaccacagagatgctggagcacccacctacatgtatgagtttcagtaccgtccaagcttctcatcagacatgaaacccaagacggtgataggagaccacggggatgagctcttctccgtctttggggccccat

SEQ ID NO: 8347 - DNA, 479 bp, Homo sapiens
  unsure (431): n=A,T,C or G
  unsure (475): n=A,T,C or G
caagaggagatcggcgcggttgtcagctaaacctcctgcaaaagtggaagcgaagccgaaaaaggcagcagcgaaggataaatcttcagacaaaaaagtgcaaacaaaagggaaaaggggagcaaagggaaaacaggccgaagtggctaaccaagaaactaaagaagacttacctgcggaaaacggggaaacgaagactgaggagagtccagcctctgatgaagcaggagagaaagaagccaagtctgattaataaccatataccatgtcttatcagtggtccctgtctcccttcttgtacaatccagaggaatatttttatcaactattttgtaaatgcaagttttttagtagctctagaaacatttttaagaaggagggaatcccacctcatcccattttttaagtgtaaatgcttttttttaagaggngaaatcatttgctggttgtttattttttggtacaaccagaaaantagt

SEQ ID NO: 8348 - DNA, 487 bp, Homo sapiens
actaaacagccaatcatggtattcaaaggacaccgtaaagcagtctcttatgcaaagtttgtgagtggtgaggaaattgtctctgcctcaacagacagtcagctaaaactgtggaatgtagggaaaccatactgcctacgttccttcaagggtcatatcaatgaaaaaaactttgtaggcctggcttccaatggagattatatagcttgtggaagtgaaaataactctctctacctgtactataaaggactttctaagactttgctaacttttaagtttgatacagtcaaaagtgttctcgacaaagaccgaaaagaagatgatacaaatgaatttgttagtgctgtgtgctggagggcactaccagatggggagtccaatgtgctgattgctgctaacagtcagggtacaattaaggtgctagaattggtatgaagggttaactcaagtcaaattgtacttgatcctgctgaaatacatctgcaga

SEQ ID NO: 8349 - DNA, 275 bp, Homo sapiens
  unsure (13): n=A,T,C or G
  unsure (207): n=A,T,C or G
  unsure (211): n=A,T,C or G
  unsure (212): n=A,T,C or G
  unsure (231): n=A,T,C or G
  unsure (234): n=A,T,C or G
  unsure (242): n=A,T,C or G
  unsure (265): n=A,T,C or G
  unsure (266): n=A,T,C or G
  unsure (269): n=A,T,C or G
gaaaagtcccggntttaggtttcagaaacagaattttcccgaatgtttaaaatggtgaatggttccataaactgtgttaaccaggcttcttacaggctagtcccagaatctgaccaccatgtgcaatactgtttctaagaaaagtgtgctccaagcaagaaccttcaaacatttaacctgaatgaatgaatataacctcttcacggntcanngttttcataagcaaaacanganaatagcancattgatgtcttttaaaaaaaanntanggctgg

SEQ ID NO: 8350 - DNA, 519 bp, Homo sapiens
ctggcattggtctagagctttataaggccattcagcgagggaccatcaagtgcaactttgcgggggttgccttgggtgattcctggatctcccctgttgattcggtgctctcctggggaccttacctgtacagcatgtctcttctcgaagacaaaggtctggcagaggtgtctaaggttgcagagcaagtactgaatgccgtaaataaggggctctacagagaggccacagagctgtgggggaaagcagaaatgatcattgaacagaacacagatggggtgaacttctataacatcttaactaaaagcactcccacgtctacaatggagtcgagtctagaattcacacagagccacctagtttgtctttgtcagcgccacgtgagacacctacaacgagatgccttaagccagctcatgaatggccccatcagaaagaagctcaaaattattcctgaggatcaatcctggggaggccaggctaccaacgtctttgtgaacatggaggaggacttcatga

SEQ ID NO: 8351 - DNA, 252 bp, Homo sapiens
  unsure (215): n=A,T,C or G
caccgtcctgctcttccagttcgggatgaatgcaagttctagccggtttttcctacaaggaatccagttgaatacaattcttcctgacgccagagaccctgcctttaaagctgccaacggctccctgcgagcgctgcaggccacagtcggcaattcctacaagtgcaacgcggaggagcacgtccgtgtcacgaaggcgttttcagtcaatatantcaaagtgtgggtccaggctttcaaggtggaaggtgg

SEQ ID NO: 8352 - DNA, 495 bp, Homo sapiens
  unsure (10): n=A,T,C or G
  unsure (422): n=A,T,C or G
  unsure (454): n=A,T,C or G
tgctcttcanatacctgacatagcaaggaaagagtgtgctgaaattggtagtacgttattctgcagttctgggcagcttctttcctgtagagttttggagcacatctctgaaagtggatgggtctggtgcctgcacacctccgtggttccttttcctgagctccagctgtggctgtctgtcagagaagcacatttttctgcagataattagaatggcttcccccatctctcacggactgtcccaagtctagaaaagaattgagttcctcttctattagtcaaataaaagggaagagaatgtttgtcttcctttcctttctgtagtgttaagaaaataaacgaacttaatgattctaaattatcagtgagcttaacactgtactatagaccaaagattaccttttcaaaaagtcctttgaggngaaatattttgtatacgtaatacatagatgcncatataaacacacacatatagaatctcaatattttaacact

SEQ ID NO: 8353 - DNA, 457 bp, Homo sapiens
ctgagcacaggccctgcagtacctacacttgacttccaagaagggaaggggttgtgtagaaatcctgcatcctcttggcatgtggaatgttctctaggtatccttattccccacagaagggactctaggtccaattctctgtcttatgactgctaccttaaggccaatgagggattctgactttgggtgggaatgaacttgggtttttccctttattcctcagttgacaggtatatacagctctgaaaccagagaaacctgactagaaaactgactgtctgaaagatgtttatcccataaagtcaaggtcgcattttccatttgaaggatagtaatattcttatatcttttgaaatcagtgcagctaaaactggcttacagtaatcttgttttctggctatgaaagattctaaaaggtgaaatataattgtttaaggagagatattgatggacctcg

SEQ ID NO: 8354 - DNA, 545 bp, Homo sapiens
  unsure (75): n=A,T,C or G
ttctgagagtggcgtggccctcacttctgttctggtgaagaaaggtgatgtcaagcccttggctgagcaaattgntatcactgctgggtgcaaaaccaccacctctgctgtcatggttcactgcctgcgacagaagacggaagaggagctcttggagacgacattgaaaatgaaattcttatctctggacttacagggagaccccagagagagtcaaccccttctgggcactgtgattgatgggatgctgctgctgaaaacacctgaagagcttcaagctgaaaggaatttccacactgtcccctacatggtcggaattaacaagcaggagtttggctggttgattccaatgcagttgatgagctatccactctccgaagggcaactggaccagaagacagccatgtcactcctgtggaagtcctatccccttgtttgcattgctaaggaactgattccagaagccactgagaaatacttaggaggaacagacgacactgtcaaaaagaaagacctgttcctggacttgatagcagatgtgatgt

SEQ ID NO: 8355 - DNA, 552 bp, Homo sapiens
  unsure (500): n=A,T,C or G
ccattctattgtggcaaggctgagtagaagatcctaccccaattccttgtaggagtataggccggtctaaagtgagctctatgggcagatctaccccttacttattattccagatctgcagtcacttcgtgggatctgcccctccctgcttcaatacccaaatcctctccagctataacagtagggatgagtacccaaaagctcagccagccccatcaggactcttgtgaaaagagaggatatgttcacacctagcgtcagtattttccctgctaggggttttaggtctcttcccctctcagagctacttgggccatagctcctgctccacagccatcccagccttggcatctagagcttgatgccagtaggctcaactagggagtgagtgcaaaaagctgagtatggtgagagaagcctgtgccctgatccaagtttactcaaccctctcaggtgaccaaaatccccttctcatcactcccctccaaagaggtgactgngccctgcctctgtttgacaaacctctaacccaggtcttgacaccagacctgc

SEQ ID NO: 8356 - DNA, 345 bp, Homo sapiens
  unsure (4): n=A,T,C or G
atanaaaactaaagaaattagataggctggaaatgcttactttctgctctcattttctttcattttgtctgctgtctttttgaatgccaatactttcatttaaaatgttttgggagcacggcaacccaaaatgactgaacggtggtccaaaaatccaaaccaactgataattacttctcgaggtgataggaaaggcacaggaagttaggactttggctgaaatgatgaaaacacatgttcgccattttagggatcagcgcctcgactcctgccacctccggctccaacgatgatcatgtttggatgtatttattgaattgtcctttgctgatgaggaatttttaa

SEQ ID NO: 8357 - DNA, 377 bp, Homo sapiens
cacacggctcacattgcatgcaagtttgctgagctgaaggaaaagattgatcgccgttctggtaaaaagctggaagatggccctaaattcttgaagtctggtgatgctgccattgttgatatggttcctggcaagcccatgtgtgttgagagcttctcagactatccacctttgggtcgctttgctgttcgtgatatgagacagacagttgcggtgggtgtcatcaaagcagtggacaagaaggctgctggagctggcaaggtcaccaagtctgcccagaaagctcagaaggctaaatgaatattatccctaatacctgccaccccactcttaatcagtggtgggagaacggtctcagaactgtttgtttcaattgg

SEQ ID NO: 8358 - DNA, 462 bp, Homo sapiens
  unsure (458): n=A,T,C or G
ccactgtgtagcaccttctaattcaatttcatcggcagttgtaataacagttccagcctcaggtgttttaatggtgggaaacatcttgattgcttctccagaaacttgaccataggttttgttttggaaatcttggagaatctcagttccttccacagcaataagttctgtgggagaagcttccatttcttctaataactcaggtttaccatcatcttctgaaggttctaattttgtgtcaggagataaagagggaggctcagttatgtgaaggtattcctcacttgatggtttgaaagtcgcttcaatatttacatgaatttccttaaaagaatcctgtggggacattacagatgagccgacgtctattcctggcagagcactgggctgggggatctctgtgtgtccagaggcttcactgcctgagtagatagtgaggggagatgatggtgtctganaaga

SEQ ID NO: 8359 - DNA, 564 bp, Homo sapiens
  unsure (554): n=A,T,C or G
ctgccacaaaccaggtgaagctttgttctaagaatatttgtttcatctagtttatgagtccaaatgatatagactgtaaatgtcacagcagtggtgaaagactgctcggtcatgagcaccgacagtaactcactggcacgtgaatttctgaccgatgtcaaccggctttgcaatgcagtggtccagagggtggaggccagggaggaagaagaggaggagacgcacatggcaacccttggacagtaccttgtccatggtcgaggatttctattacttaccaagctaaattctataattgatcaggcattgacatgtagagaagaactcctgactcttcttctgtctctccttccactggtatggaagatacctgtccaagaagaaaaggcaacagattttaacctaccgctctcagcagatataatcctgaccaaagaaaagaactcaagttcacaaagatccactcaggaaaaattacatttagaaggaagtgccctgtctagtcaggtttctgcaaaagtaaatgttttttcgaaaaagcagacgacagcgtnaaattaccca

SEQ ID NO: 8360 - DNA, 457 bp, Homo sapiens
  unsure (283): n=A,T,C or G
  unsure (374): n=A,T,C or G
  unsure (394): n=A,T,C or G
  unsure (403): n=A,T,C or G
  unsure (423): n=A,T,C or G
  unsure (447): n=A,T,C or G
  unsure (448): n=A,T,C or G
ccaaaaacctgcactcagaaagaggtgatgtttttaggagaaattgaagaaatcttagatgtcattgaaccaacacagttcaaaaaaattgaagagccacttttcaagcagatatccaagtgtgtatccagttctcattttcaggttgcagaaagggcattgtacttctggaataacgaatatattcttagtttgattgaggagaacattgataaaattctgccaattatgtttgccagtttgtacaaaatttccaaagaacactggaatccgaccattgtancactggtatacaatgtgctgaaaaccctaatggaaatgaatggcaagcttttcgatgaccttactagctcatacaaagctgaaagacaganagagaaaaagaaggaattgnaacgtgaanaattatggaaaaaattagangagctaaagctaaagaaagctctnnaaaaacaga

SEQ ID NO: 8361 - DNA, 186 bp, Homo sapiens
ccacagcggcccttcacctcagctccccgggtcaatgcgatatcggcctgttctgtgatcagatctacgtagttgctggcccacacatcataaggtacaataaatttggctgcaaactctgccatgagacacgtcgtcccattttcccgcaccacaaatatatctttttcagggttagtggaaagg

SEQ ID NO: 8362 - DNA, 509 bp, Homo sapiens
ccattaaaaagcaagatgaacctattgatctcttcatgattgagatcatggagatgaaacataaatctgaaactgatacaagcttaatcagagggcttgttttggaccacggagcacggcatcctgatatgaagaaaagggtggaggatgcatacatcctcacttgtaacgtgtcattagagtatgagaaaacagaagtgaattctggctttttttacaagagtgcagaagagagagaaaaactcgtgaaagctgaaagaaaattcattgaagatagggttaaaaaaataatagaactgaaaaggaaagtctgtggcgattcagataaaggatttgttgttattaatcaaaagggaattgaccccttttccttagatgctctttcaaaagaaggcatagtcgctctgcgcagagctaaaaggagaaatatggagaggctgactcttgcttgtggtggggtagccctgaattcttttgacgacctaagtcctgactgcttgggacatgta

SEQ ID NO: 8363 - DNA, 445 bp, Homo sapiens
cccttggaagggcccccctctgtttgataatcaacaaatctttccccatcataggaaaataaaagaatgaagcaatgcctggaagaagaactgaaatcaagaagggacctagaaaagctggtgcggaggcttttgaagcaaacagatgagtgtattcgaggcgagtccagtagcaagacctcaattcttccataaccatcactgtgccactgggtggagtgtgccttcagggcatcttgaaatgtcccgctgaatgatttgactcagtttgctcacttctttggcttttgttttgtgtttgagtctctctctctctccctctctcttctctttctctccccgctgtgtgcatatgtgtgtgcgtgcacgtgcgcgcttgggcatttgctgttgtttggttattggttggttgttcattttttttttcaacaggtgaaaaagcagg

SEQ ID NO: 8364 - DNA, 321 bp, Homo sapiens
ccaggctggtctcgaactcttggcctcaggtgatccacccactttggcctcccaaagtgctggggttacaggcatgagcgacctcatgggtgtagattttgcgaacagataaaggtagatgatattgggctgctttgttgtcatcatctattctattccctctccttgagaagttctcatgaaacacttatacctcgatgtgagtcaccttaaatcgttttgggatgcggcaagcaacacataagttaatagccatcatgacaacccctgaagacacctgggctttggcactgggagcgtggtccaagtatggtagcgagg

SEQ ID NO: 8365 - DNA, 466 bp, Homo sapiens
gtaaaagatttggtatattcagaatgcatgtgatggaacacacacataggagttatgaaccaaggtgcaattaatttagatcagaagccatatattccagatggtctgatgaaaaagccaattaagtataaaatgaaaacttgctcaaaaaggcaattaattttccgttttaatttaattatttattgtgaaagatatatagttgacagtatgttgacctgtttttttctcctttcttgttttataatgtcatatcttcctgacatatgtgtttctctataaaatttgaataattgcactaaattaaatcctgctagttttgggagaaaaatctagtagggttctttttctaaggtggtgattataacagttatgcatattcaatgaatattcaattctgcttttcaaaataacctattaagttttaaagagtaattacattagctatattcactagtaaacattt

SEQ ID NO: 8366 - DNA, 186 bp, Homo sapiens
ctgccacaaccgccatgaccccagtggcagggtcagtgcccacaagggggttgcctgctttgactgaactaacctgtgggtttagtccaacgaacagatgtgcctgatttcagggctgaatttttgcttgaccacaagtctcgggcagaacagattcgcctatgactgaatcgactgaatggatgg

SEQ ID NO: 8367 - DNA, 337 bp, Homo sapiens; identical to SEQ ID NO: 4598

SEQ ID NO: 8368 - DNA, 401 bp, Homo sapiens
  unsure (359): n=A,T,C or G
  unsure (393): n=A,T,C or G
ccagcctggtctcgaactcctgatcttaagtgatccgcccatcttggcctctcaaagtgctgggattacaagcgtgagccaccgcacccagcagtaaaaataatactagtaattattaactacatttttaaaacatatgtgctctgagcaagactctgggccagggtctttcctgattattctcttgagtacttaccccagttctttgagttagacactaccgccctcatttttatgatgagttaagacagcaagtaacttgtctaagaacactcccttagtgaagtgtagagttaggattccaacccaatgtatgtgctgctgtgttatactttctaacactacaagtaacagcccanatggagagtgaggagggaggaaagcgttatttanggaccagg

SEQ ID NO: 8369 - DNA, 340 bp, Homo sapiens
  unsure (313): n=A,T,C or G
cgcgtcaggttataaatgaccctatctccttagttgtgtactctcgtgccaaaactgctggctgagtgtaccctttctgcaggaagtaaaaatggccttactaaataaatttatgttcaagtgctatttctttatggcaccggagaacaagcatttcaaacaatttggtggcaatccgtacggggatacattcttctctaggggcggtctccagtcctctctcatggggtagcgctcccctacttcattgcaaggtcctcataggtaagaaattgagacccacccggtgtgacgaataaacctgggctctcancaatgggggcaaaaaaaaaaaaactgg

SEQ ID NO: 8370 - DNA, 170 bp, Homo sapiens
gtcccgatcaaggtccagatcagttgacagtggcaattaaactgtaaataacttgccctgggggcctttttttaaaaaacaaaaaccacaaaaattcccaaaccatacttgctaaaaattctggtaagtatgtgcttttctgtgggggtgggatttggaaggggggttgg

SEQ ID NO: 8371 - DNA, 449 bp, Homo sapiens; identical to SEQ ID NO: 8036

SEQ ID NO: 8372 - DNA, 493 bp, Homo sapiens
  unsure (427): n=A,T,C or G
  unsure (472): n=A,T,C or G
ccattatagtaatagtcataaatcaaaataccaaacagatctttatgaaagagaaaggagtaaaaagagagaccgaagcagaagtccaaagaagtccaaagataaagaaaaatctaagtatagatgaaagatgaagaggcagaattgagaggctaacatatttactcttgtctaacttaagagtgccaggaaagcagatgcttagattttgtgtcaaagcttgttatttttttcatactaggattatggtctttagattaatactgattatatagagcacggaaagataaagaattgaacattttctttgtatacttttttacactaattttattgttatacataaatggtagtcttcatttttgaagtcttacattttcactctttttttaatgaagtatttcatactacaaaaatacataaacgnatatataaagggataataaatgtaaatatctgtgtactcatcagncagcttaagatacagatgttg

SEQ ID NO: 8373 - DNA, 481 bp, Homo sapiens
ccaggtgcgcaccctgtggcatgaccctcgtcacataggctggaaagatttcaccgcctacagatggcgtctcagccacaggccaaagacgggtttcattagagtggtgatgtatgaagggaagaaaatcatggctgactcaggacccatctatgataaaacctatgctggtggtagactagggttgtttgtcttctctcaagaaatggtgttcttctctgacctgaaatacgaatgtagagatccctaatcatcaaattgttgattgaaagactgatcataaaccaatgctggtattgcaccttctggaactatgggcttgagaaaacccccaggatcacttctccttggcttccttcttttctgtgcttgcatcagtgtggactcctagaacgtgcgacctgcctcaagaaaatgcagttttcaaaaacagactcagcattcagcctccaatgaataagacatcttccaagcatataaa

SEQ ID NO: 8374 - DNA, 114 bp, Homo sapiens
cgcgtatgtgaacttccagcagccggcggacgcggagcgtgctttggacaccatgaattttgatgttataaagggcaagccagtacgcatcatgtggtctcagcgtgatccatc

SEQ ID NO: 8375 - DNA, 462 bp, Homo sapiens
  unsure (366): n=A,T,C or G
  unsure (371): n=A,T,C or G
  unsure (387): n=A,T,C or G
  unsure (438): n=A,T,C or G
ctggtggttttcttcaggttccagcctctcttggcatctgctgccttgtttcctgtggaaacagcaagcagctctgcacggttcttctcatccttgccttgcagaagagcctgtttatttttgcctctgtcacttcctgaagaaatcagtgtattttcaatacagtgtggctcctttctcctaggttcagttaggtcgtgtttcctagcagtgtcactattcaagggttgagtccacgtcttgctctctggagaatgtcaatgtaatgtatttttcccatcgtacagagtctttgttgatttgcaaaatgttggatttggggttcatacccatattttttgttgtcatgggcatttaggtcatcantctgntctcttatttgcttgntcttttgttaattcattcccatggctatatgccagacacagcatgatgcanaaggaatacgacagaggatgacac

SEQ ID NO: 8376 - DNA, 368 bp, Homo sapiens
ccatgtaaataagatgatttaatgttgattttaatcctgtatataaaataaaaagtcacaatgagtttgggcatatttaatgatgattatggagccttagaggtctttaatcattggttcggctgcttttatgtagtttaggctggaaatggtttcacttgctctttgactgtcagcaagactgaagatggcttttcctggacagctagaaaacacaaaatcttgtaggtcattgcacctatctcagccataggtgcagtttgcttctacatgatgctaaaggctgcgaatgggatcctgatggaactaaggactccaatgtcgaactcttctttgctgcattcctttttcttcacttacaagaaagg

SEQ ID NO: 8377 - DNA, 497 bp, Homo sapiens
gtttgtgaaagatgtcttttcacctataggggagagactgggctgggaccccaaacctggagaaggtcatctcgatgcactcctgaggggcttggttctgggaaaactaggaaaagcaggacataaggcaacgttagaagaagcccgtcgtcggtttaaggaccacgtggaaggaaaacagattctctccgctgatctgaggagtcctgtctatctgactgttttgaagcatggtgatggcactactttagatattatgttaaaacttcataaacaagcagatatgcaagaagagaaaaaccgaatcgaaagagtccttggcgctactcttttgcctgacctgattcaaaaagtcctcacgtttgcactttcagaagaggtacgtccacaggacactgtatcggtaattggtggagtagctggaggcagcaagcatggtaggaaagctgcttggaaattcataaaggacaactgggaagaactttataaccgatacc

SEQ ID NO: 8378 - DNA, 329 bp, Homo sapiens
  unsure (303): n=A,T,C or G
gggagtagccaggctggatggctcaaatataaatgaatgaggaattctttatgaagtatcagtcagattttatgattaagtgatgtaatataggaattatgtaaaagggaagaatgtctgatactgatctattagagaggtactttagaggcttcttgattggcataaagttcctaaggttatagattttccccccttttggctgtatagcaaagtgttttaatccacggttgtgtcttattgttccattaaaattgtatcttcgatccatcaataaatacttgtggttgaatcaaaaaaaanaaaaaaaaaaaaaaaaaggcttgtac

SEQ ID NO: 8379 - DNA, 415 bp, Homo sapiens
  unsure (382): n=A,T,C or G
  unsure (410): n=A,T,C or G
gaggtatggatggatgaatagatagatgatggatggatggaggggtaatgaatagatggatgacttaaactttagcaaaaggaattcatctggaaaatcataaaaggtgagtctgatgcataatataagtgtgaggaagaaatggaatctgagtctggagaggtacactagacagacagaagcagatgagtgaaactcttggatagcatctttcttcaaattccttgaatatattaaataataaatttggaattatagagccctcattggaagaatataaaatttcaaattaaaaaactagggcatatgcatatccaactgcttttttaaaaaagaaaagaaaaggaactaagggcaaaaacatggctgtcagctttctctntatcttctcaattcttttcaaattctancccac

SEQ ID NO: 8380 - DNA, 571 bp, Homo sapiens
ccaccaacagtttcccagccacatgctgggccctctaggtctctccagcccactctaaggacccaagaaatgcagccacagtccatctctcttttttctctccttccgggggaccaaggtaccttctggggcatacaacatggcagcagggcctcgggaagaggggtaggaggaccgagcagcattctctgtagaggaagacaggaaaggagaccctcttggcacacatttatggagggttgtccctgaagagaagggcaggtgggagaggttccctgttacttaagagaaggcaccagtggcaaagagcacaatgaagaggatgatgataaaaacaatcacgcagataaggacaatcatcttcacgttcttccaccagaattttcgagccaccttctgcgatgtcgtcttgaagtgctcagatgtggcttccagatcctctgtcttgttgcggagatgttccaagttttccccccgggccaggatccgctccacattctgggtcataatattcttaactccctccacctcactttgcaggttccgcacacgatcatttcctccaccttca

SEQ ID NO: 8381 - DNA, 204 bp, Homo sapiens
  unsure (175): n=A,T,C or G
  unsure (197): n=A,T,C or G
ctgggatttcaaacagactgtcccattgtcaaacatttggtttgaaataaaaggactcttagtataactctgggccagaggggaagaaggggtgagggcagctagcgtggcaccctgggtccaactccaaccccttctgttgccagcaatgtgaccaaatacttacacctcccancaagtttctgtttctttaatgnaaatgta

SEQ ID NO: 8382 - DNA, 466 bp, Homo sapiens
  unsure (437): n=A,T,C or G
ccagcgacagcctggcctgggaatggactggcagctcatcactaaaatgactcctttcatggaatccactgttatgcagccacactgaccacagagcaactgaataggtgagcattggattgttgatgacaactcttcagcagaacaattgtgtgtttgaagggactgttttatgatgaaataactgttatttcctggagctaattgttgaatgacagtttgtcaactgtttaaatgaatttcatttgaattaacaattatacagccactcagaggtcctacattcgccagagttggcatccagttgatgggttcatttgaattaaatggtttggaggctaacgtgattttttaaattgaatttcatcactattctgtgtattctatttatcactattctaaatgactcatggttggctaattgattatcatgtaancaagctatttgaagaaattgattacatat

SEQ ID NO: 8383 - DNA, 255 bp, Homo sapiens
ccatgtcgtactactttgaccgcgatgatgtggctttgaagaactttgccaaatactttcttcaccaatctcatgaggagagggaacatgctgagaaactgatgaagctgcagaaccaacgaggtggccgaatcttccttcaggatatcaagaaaccagactgtgatgactgggagagcgggctgaatgcaatggagtgtgcattacatttggaaaaaaatgtgaatcagtcactactggaactgcacaaactgg

SEQ ID NO: 8384 - DNA, 182 bp, Homo sapiens
ccaatcaattctggaattacccacttgtttaattttgagcaacatgatctagcattaatgtaatcacattctaaatcagacaatgtaattatgaagtagaccgagaggaagatgagcgcgcaacaatcgaggagagagaagacgaacaccaccgcctccatcctcctcctccgtcgccgccg

SEQ ID NO: 8385 - DNA, 390 bp, Homo sapiens
  unsure (363): n=A,T,C or G
cctttatgttggggcctatgtggaaactctagccccgtgcttccattacatacaaaccgaatatattaaagctttagagtttttacaactatctatctttcccctgacatctccccagccaccttagaggtgggaaaggaaaggatataagaaaaccccactaaatgtggagtacatttcatcaaagtctgtgtgagccagcttgcccccagtcaccacgacgttgactgcatctcccgccttcaggtgcacgatgaggtggaatgcccccgggcccccgcaggtatgcaaagctcctggagggcggtggtattccaggaactctctcctgtacccagcggtatgcagacctgcccgggcggncactcgagccctatagtgagtcgtatt

SEQ ID NO: 8386 - DNA, 275 bp, Homo sapiens
  unsure (14): n=A,T,C or G
  unsure (138): n=A,T,C or G
  unsure (151): n=A,T,C or G
  unsure (153): n=A,T,C or G
  unsure (181): n=A,T,C or G
  unsure (197): n=A,T,C or G
  unsure (202): n=A,T,C or G
  unsure (210): n=A,T,C or G
  unsure (240): n=A,T,C or G
  unsure (247): n=A,T,C or G
  unsure (269): n=A,T,C or G
ctggtactctgcantggttttctctttgttgttcacaatcacagtacatttatatgtccctgagtcatagatccggacttcaggaataaaataactctctgtgctcttcatggaggagatgttgtaaaacagcacgtnatccttatagaanancatctggtgctgaggcttgacgtgagangtggtgctgacatccncgaancactgcanggtcaggttcttcccattttgcaccgtccngtccggnaggctcttcatgtcaacactgntgattg

SEQ ID NO: 8387 - DNA, 363 bp, Homo sapiens
cctctctcacctctcctactcacttaaagcccgcctgacagaaaccacggccacatttggttctaagaaaccctctgtcattcgctcccacattctgatgagcaaccgcttccctatttatttatttatttgtttgtttgttttattcattggtctaatttattcaaagggggcaagaagtagcagtgtctgtaaaagagcctagtttttaatagctatggaatcaattcaatttggactggtgtgctctctttaaatcaagtcctttaattaacactgaaaatatataagctcagattatttaaatgggaatatttataaatgagcaaatatcatactgttcaatggttctgaaataaactt

SEQ ID NO: 8388 - DNA, 334 bp, Homo sapiens
  unsure (8): n=A,T,C or G
  unsure (10): n=A,T,C or G
  unsure (14): n=A,T,C or G
  unsure (22): n=A,T,C or G
  unsure (27): n=A,T,C or G
  unsure (46): n=A,T,C or G
  unsure (51): n=A,T,C or G
  unsure (60): n=A,T,C or G
  unsure (86): n=A,T,C or G
  unsure (296): n=A,T,C or G
tgacagantncaancaaataanatagngatgctggtcaggcttggnggctnatgcctgtnttccctaaactttgggagcctaaggngagaactccttgaactcctaaggccaggagttcaagaccagcctggataacatagcaagaccccatctctacaaaaaaccaaaaccaaacaaacaaaaatgatagtggtgcttccctcaggatgcttgtggtctaatgggagacagaacagcaaagggatgattagaagttggttgctgtgagccaggcacagtgctgatataatcccancgctatgggaggctgaggtgggtggatcatttgaggcc

SEQ ID NO: 8389 - DNA, 478 bp, Homo sapiens
  unsure (378): n=A,T,C or G
  unsure (414): n=A,T,C or G
ccagcgacagcctggcctgggaatggactggcagctcatcactaaaatgactcctttcatggaatccactgttatgcagccacactgaccacagagcaactgaataggtgagcattggattgttgatgacaactcttcagcagaacaattgtgtgtttgaagggactgttttatgatgaaataactgttatttcctggagctaattgttgaatgacagtttgtcaactgtttaaatgaatttcatttgaattaacaattatacagccactcagaggtcctacattcgccagagttggcatccagttgatgggttcatttgaattaaatggtttggaggctaacgtgattttttaaattgaatttcatcactattctgngtattctatttatcactattctaaatgactcatggntggctaattgattatcatgtaagcaagctatttggaagaaattgattacatatatttatatata

SEQ ID NO: 8390 - DNA, 554 bp, Homo sapiens
ctgcaaagttaatagccagtatagtgtttggggaaacactataagctattaccaaaaaatcctctgtgagagggtgttagttggatgtcacataacataaatgatgtactgtgtggaagaacagttgttgtattgtgtattgtgggatttgtttttagatgaaaccgttaatgtatgtagtaggaattaacttttacataggtgaagtacaaatagagaagtgatagtgatttttttctctttatcaccaaaatcttatattgctaaagaatgaattttccctctcagaaaacactacattatcctaatttctttactttttaatcttgctattcaacagaaaaatatcctgttgcattcttcttttccaagtatgtcttaaataacggtagccccctgctcttccattttaactttagagtcagcatgtcatttgccattaacgaaaaccaaaacaaaacaaaaactaaagaaaaccaaactaagaggatatctacagaaatttcattgaatgtattaatgccagttactccacaaactggcctattattatt

SEQ ID NO: 8391 - DNA, 444 bp, Homo sapiens
  unsure (124): n=A,T,C or G
  unsure (182): n=A,T,C or G
  unsure (184): n=A,T,C or G
  unsure (249): n=A,T,C or G
  unsure (334): n=A,T,C or G
  unsure (396): n=A,T,C or G
cttttttttttttttttttttttggaaacagggttttgctctgttgcccaggctggagtgcagtggtgcaatctcactgcagcctccacttcctggctgcaagcaatcctccaagcacagcctntcgagtagctgggactacaggcatgtgccacttgtctggctaattttattttttgtananatgaggtctcactatgctgcccaggctggtctcaaactactgggtttaagcgatcctcccacctnagcctcccaaaatgttgggattacaggcgtgagccaccatgcctagccggtaatctcttttttagtgaaaaaaattgaggtttanaaagtttaagtaacttgaccaaggtcgtacagctaatgagtaggagggcgagctggagctanaatccaaatcacagttctggtcttaaaacctccttatttccattaata

SEQ ID NO: 8392 - DNA, 474 bp, Homo sapiens
gggagatcagcactctctccccaatttatgttctcaatgggcatatgttgtttagaccaccaaaaatcaaggttagacatcctcagatgattgcaccaccctaaagccttacctccatttcaccgaaggagtcaccgccccccacaactgtcacacccaccagtgcaacccactactcatctctattactatccctacctctagcaactctaaccccaccttaggtgcttctatggtctaggagaaaatgccgttagaaaggactctacaggcttctttgaaatgcgctttgtttcttccccgctatcctctattgttaccccttccccaagcccatccaatcaaaccatctaccatttcatgcccaatgacaaaaccaaagtagttataataaaagtcaaggatttaaaacaaactttagccataacaactgggtaccaagatataaatgcctggctgaaatggattaaatat

SEQ ID NO: 8393 - DNA, 444 bp, Homo sapiens
  unsure (422): n=A,T,C or G
  unsure (440): n=A,T,C or G
ccactagaggtctgtgtgccattgcccaggcagagtctctgcgttacaaactcctaggagggcttgctgtgcggagggcctgctatggtgtgctgcggttcatcatggagagtggggccaaaggctgcgaggttgtggtgtctgggaaactccgaggacagagggctaaatccatgaagtttgtggatggcctgatgatccacagcggagaccctgttaactactacgttgacactgctgtgcgccacgtgttgctcagacagggtgtgctgggcatcaaggtgaagatcatgctgccctgggacccaactggtaagattggccctaagaagcccctgcctgaccacgtgagcattgtggaacccaaagatgagatactgcccaccacccccatctcagaacagaagggtgggaagccaganccgcctgccatgccccanccag

SEQ ID NO: 8394 - DNA, 59 bp, Homo sapiens
  unsure (48): n=A,T,C or G
  unsure (51): n=A,T,C or G
cggccgaggtcccccccccctttttttttttttttttttttttttttnttnagggaagt

SEQ ID NO: 8395 - DNA, 334 bp, Homo sapiens
cctaggcacagaggagcaggttagggcacattcaccttctcaggattctgtggctccctcattggagaagggagacagcatcttgggggcgcaattccaagagcagcgagggcagaggttagagatggctgagagcccctaacctgaggcggcaccacaataggcagcaacaactgtgtggaaagctggatgaactggtcagtagcggaaaatgggagggggcactgggttggcctcttggggaggggtccaaccttggcttggatgagctcatgagaatacccagtgttcccaagcagaggggggcagagcccaaagcccctttctctgcagg

SEQ ID NO: 8396 - DNA, 564 bp, Homo sapiens
ccagtggggcagcccttccccattggggtttccattgcgagcaaagttggcccagaatttcatcaccatcttgctaagtctgatctcctcttctgaggcaccctcttttaaaaatggggccccaaagacggagaagagctcatccccgtggtctcctatcaccgtcttgggtttcatgtctgatgagaagcttggacggtactgaaactcatacatgtaggtgggtgctccagcatctctgtggttccgggccacaatcacagatgggacaccaaacatcacatctgctatcaagtccaggaacaggtctttctttttgacagtgtcgtctgttcctcctaagtatttctcagtggcttctggaatcagttccttagcaatgcaaacaaggggataggacttccacaggagtgacatggctgtcttctggtccagttgcccttcggagagtggatagctcatcaactgcattggaatcaaccagccaaactcctgcttgttaattccgaccatgtaggggacagtgtggaaattcctttcagcttgaagctcttcaggtgtttt

SEQ ID NO: 8397 - DNA, 606 bp, Homo sapiens
  unsure (519): n=A,T,C or G
  unsure (535): n=A,T,C or G
  unsure (566): n=A,T,C or G
  unsure (568): n=A,T,C or G
  unsure (598): n=A,T,C or G
ctgtcagttctctaaacatttgcagcatcctactcagatctggagcatggaatacagtcttcagtttcttggaaaccatttttggctttttcagcctccagatctcactccatttcatgattccactcatgtcctgcagcagctccattgttgaccactgactccgacactccacatctgagatgagctctctcaccaactgcttctgctgaactagctcatcctcagcctctgcaaacttatccagcgtcttcttttcttcttcttccaatctttgcagctctctctgctcctcattatttaggatgcttctaagctgatcaaattctgtttgtatcctttgtctctcagtttgtacctgatacttccaggaagttttctcttctctgatgtcagcttccagcttctcagcttcctcctcttccttcttcagcctcttgaggactgcctggagtttctcctgacattccttgaatacttcctccgtgaggactgtgtggtgaccacggtgctcctganaccgctcacaaagccngcaaatgactttcctatcctccttacagaanantaggagtttctctccatgatgatcacaganatctctct

SEQ ID NO: 8398 - DNA, 372 bp, Homo sapiens
  unsure (104): n=A,T,C or G
  unsure (367): n=A,T,C or G
gtctgaatgtggtgctttgcttctgtcctggttgaccctctgctgctgggccatcaaagtttggtgcatcttctgccaatcgcagacatagctgagcatacagngagctatactttggctcttctagggctttgtccacaatcagcagtatgacccctttaaggatgagtttagactctacacccacattgaggagctcaaggcatagcttgtcaaacttttcaggagtaagcttatttagtatgcctcttactttcctgaagattgcatcatgtcgttctttttcgtttgcggagttgtttgctgcggagttgtcatctcgtctagtgcttcgtgcaggaatccatttctgagcgttttgccctgnggttt

SEQ ID NO: 8399 - DNA, 570 bp, Homo sapiens
  unsure (427): n=A,T,C or G
  unsure (480): n=A,T,C or G
  unsure (527): n=A,T,C or G
cctccccttccccagcagttcgaggctcttcactcttccagatcccagagcttctgctctgttttactcctggtcaaaaatcccagcatccttctgtacctctcaaaagccctgtttttcgggaagctgcctccggactacttttgtttcccaggattttgaagcctgaataccagggcttacttgggagaatctgttctttggcttgaagaagcggaatcgagtgaaggagacagaaaaatagagtaacaatagagtgataagtgcttataccagtgacatacagggcctgtgggaacataaagctaaccaagcagagtgggtcgggggcctgctgaggccatttctctttttttttcttaattgacacagaattgtacatatttatggggtatatagtgatgttccgataaatgtaatgtattgngatcagatcaaggtagttagcatattcacctcaaacgtgtatcatttctttgngttgggagcatttaatatcctagctatttgaaactatatattattgncagctatagtcatcctacagtgctatagaacactagaacttat

SEQ ID NO: 8400 - DNA, 542 bp, Homo sapiens
  unsure (118): n=A,T,C or G
  unsure (454): n=A,T,C or G
ctaaaataaaatttttttaatttttaaaaattacatttttatattatcttattagtatatgctcactgaggaagaaaacatttcaagcaatacagaaatgaatataaataaaatgttnaggttcttctcacctccctgttactcatagttgctagaggtgatcatttgaaaacgtggtaggctgggtgtggtggctcacacctgtaatccgagtactttgggaggccaaaaaaaaggaaggaggcttacttgaagccaggggttcaagaccaacctggcaacatagtgagaccccatctctgcaaaaaaaaattttttttaagtaactgccttttaatagcaaaataataccatcctaatctaaccacagagttaaaaaagaaagaaagtgtggtgtatatgattcagaccatttgttatctttatacaaaagtgactatgtgaaattctttgnttgtatttaagctaacgtgggattatattttacaaagtttttgtgaacttgcattttgtatttaccttgtctatagagcacagataca

SEQ ID NO: 8401 - DNA, 503 bp, Homo sapiens
gtttcattagagtggtgatgtatgaagggaagaaaatcatggctgactcaggacccatctatgataaaacctatgctggtggtagactagggttgtttgtcttctctcaagaaatggtgttcttctctgacctgaaatacgaatgtagagatccctaatcatcaaattgttgattgaaagactgatcataaaccaatgctggtattgcaccttctggaactatgggcttgagaaaacccccaggatcacttctccttggcttccttcttttctgtgcttgcatcagtgtggactcctagaacgtgcgacctgcctcaagaaaatgcagttttcaaaaacagactcagcattcagcctccaatgaataagacatcttccaagcatataaacaattgctttggtttccttttgaaaaagcatctacttgcttcagttgggaaggtgcccattccactctgcctttgtcacagagcagggtgctattgtgaggccatctctgagca

SEQ ID NO: 8402 - DNA, 358 bp, Homo sapiens
cctgtggggacgcagcagcatctctggagcggaggaagagagaggctgacacaaggctctccccctggggcggaagagctgccccagaagctgagaaacctccacaaaacaaaaacagtttgattccatccagcaactggtgacttattagctgcattgttttcaacatcacccctggcctgagctcaaatgtggctttattttgcaagcggctttgtgtgtggagacacatccggggttgataatgttgcagactgggatattttggttctttattgaaagggaagatcttactgccaccgggccccgcctcaccctccagattggaaactatgtgacccttacgatggggtcccag

SEQ ID NO: 8403 - DNA, 265 bp, Homo sapiens
  unsure (21): n=A,T,C or G
cttcactcagcaccttggcangatctgtgacggactcaggaagctgctagacgaagggaagctctgagagccctgagcctagcacattccaccttgacaaaatggttgactgagaaaacacagataatgggcttcctaaccctgctcacctggcactaacacttttcaatcttcaggcttcattccttcccaagagtgcttttgactctgagaccagcccacccccaaacagctagtggagaaggagcaatgctgaggggtgagg

SEQ ID NO: 8404 - DNA, 205 bp, Homo sapiens
  unsure (11): n=A,T,C or G
  unsure (27): n=A,T,C or G
  unsure (29): n=A,T,C or G
  unsure (50): n=A,T,C or G
  unsure (53): n=A,T,C or G
  unsure (66): n=A,T,C or G
  unsure (183): n=A,T,C or G
caaatcatttnacactgtttgtatcangngcttggcacaggaagatgccncanggtcaataaaatncagacaatattattacttaaatcctataaaacttttctgaggctggatgtggtggctcatgcctgtaatcccaacactttgggaggccaaggcaggaggaatgcttgagcccagganttcaagattagcctgggcaaaa

SEQ ID NO: 8405 - DNA, 358 bp, Homo sapiens
  unsure (259): n=A,T,C or G
  unsure (273): n=A,T,C or G
  unsure (278): n=A,T,C or G
  unsure (306): n=A,T,C or G
ttcagccacctctctttttcagttggctgacttccacacctagcatctcatgagtgccaagcaaaaggagagaagagagaaatagcctgcgctgttttttagtttgggggttttgctgtttccttttatgagacccattcctatttcttatagtcaatgtttcttttatcacgatattattagtaagaaaacatcactgaaatgctagctgcaagtgacatctctttgatgtcatatggaagagttaaaacaggtgganaaattccttgattnacaangaaatgctctcctttcccctgcccccanaccttttatccacttacctagattctacatattctttaaatttcatctcagg

SEQ ID NO: 8406 - DNA, 391 bp, Homo sapiens
  unsure (282): n=A,T,C or G
ctgaggaacaaagtatcagaggagcatgatgttctcaggaagaaagagatggagtcagggcccaaagcatcccatggctatggaggtcggtttggagtagaaagagaccgaatggacaagagtgcagtgggccatgagtatgttgccgaggtggagaagcactcttctcagacggatgctgccaaaggctttgggggcaagtacggagttgagagggacagggcagacaagtcagcagtcggctttgattataaaggagaagtggagaagcatacatctcanaaagattactctcgtggctttggtggccggtacggggtggagaaggataaatgggacaaagcagctctgggatatgactacaagggagagacggagaaacacgagtccc

SEQ ID NO: 8407 - DNA, 383 bp, Homo sapiens
  unsure (18): n=A,T,C or G
  unsure (328): n=A,T,C or G
  unsure (346): n=A,T,C or G
tgcctgttggtcctgcangcggaaaccaaatgttggagcagtatgacaagctacaagatggcagcatcaaaatgaagcctctgatgggggtgatatacgtgcctttaacagataaagaaaagcagtggtccagggatgaattgtaaaagcaacatcagcttgaccagtataaaattacagtggattgctcatctcagtcctcaaagctttttgaaaaccaacaccatcacagcttgttttggactttgttacactgttattttcagcatgaaaatgtgtgtttttttagggtttctgattcttcaaagaggcacagagccaaattggnagaggaaggatgcaaagnataaatttgtgtaatattactttaacatgcccatatt

SEQ ID NO: 8408 - DNA, 497 bp, Homo sapiens
  unsure (301): n=A,T,C or G
  unsure (349): n=A,T,C or G
  unsure (394): n=A,T,C or G
  unsure (464): n=A,T,C or G
aaggctaacagaaaagtgtttggacagtgggtgtcgagcagtactctaaacatgagtgaagccataaaagggttcctggtcaagtgctgtgcatacaattcccttggcacatcttgtgagacgatccttttaaactctccaggccccttccctttcatccaagacaacatctcattctatgcaacaattggtgtttgtctcctcttcattgtcgttttaaccctgctaatttgtcacaagtacaaaaagcaatttaggtatgaaagccagctacagatggtacaggtgaccggctcctcanataatgagtacttctacgttgatttcagagaatatgaatatgatctcnaatgggagtttccaagagaaaatttagagtttgggaaggtactangatcaggtgcttttggaaaagtgatgaacgcaacagcttatggaattagcaaaacaggagtctcaatccncgttgccgtcaaaatgctgaaagaaaaagcaga

SEQ ID NO: 8409 - DNA, 541 bp, Homo sapiens
  unsure (15): n=A,T,C or G
  unsure (20): n=A,T,C or G
  unsure (23): n=A,T,C or G
  unsure (57): n=A,T,C or G
  unsure (169): n=A,T,C or G
  unsure (221): n=A,T,C or G
  unsure (396): n=A,T,C or G
  unsure (513): n=A,T,C or G
  unsure (518): n=A,T,C or G
ccccatcaccactgncccgnggntgcctgtgtacctcttgccttttctgggcttgcntttctctcctctagtgggtggggatgactttcaatgactttcaatacttcccctgaaggaagaatgataaggagaaatgtctgttttgaggaaagggctttgaattccccanatactgaacaatttgtgtttgtgactgatggagaatttcaggaatgaatganaaagcctttgtgaaactatgcaacagtttacatcagtcatgtgaagtatttgtctaaaacagagcaaactgaagaccaaattattctcctgttgaggtccgtggatggcagatttaaagggaagaaccacaaaggcttgcaaagataggagaggctccatctctaatgcatgtanaagctccttacgggtgcccatcaagagcatagcttggaagccaccatgctgtgcggaactgcgtcagggcaaatgtcacagcaggatttccccaacccagctccatcatcacaaacncaganagctgcaggggaggacctcggcc

SEQ ID NO: 8410 - DNA, 433 bp, Homo sapiens; identical to SEQ ID NO: 8312

SEQ ID NO: 8411 - DNA, 379 bp, Homo sapiens
gagaaagccatgttcagttcgagcgccaagatcgtgaagcccaatggcgagaagccggacgagttcgagtccggcatctcccaggctcttctggagctggagatgaactcggacctcaaggctcagctcagggagctgaatattacggcagctaaggaaattgaagttggtggtggtcggaaagctatcataatctttgttcccgttcctcaactgaaatctttccagaaaatccaagtccggctagtacgcgaattggagaaaaagttcagtgggaagcatgtcgtctttatcgctcagaggagaattctgcctaagccaactcgaaaaagccgtacaaaaaataagcaaaagcgtcccaggagccgtactctgacag

SEQ ID NO: 8412 - DNA, 353 bp, Homo sapiens
ccagtggggcagcccttccccattggggtttccattgcgagcaaagttggcccagaatttcatcaccatcttgctaagtctgatctcctcttctgaggcaccctcttttaaaaatggggccccaaagacggagaagagctcatccccgtggtctcctatcaccgtcttgggtttcatgtctgatgagaagcttggacggtactgaaactcatacatgtaggtgggtgctccagcatctctgtggttccgggccacaatcacagatgggacaccaaacatcacatctgctatcaagtccaggaacaggtctttctttttgacagtgtcgtctgttcctcctaagtatttctcag

SEQ ID NO: 8413 - DNA, 505 bp, Homo sapiens
ccagtggaaatcatgccatatatggactccaaagttgacaatctgcctctgagttctggctctgcccatgggagaattcaattgaatatttttagtccttcatctccttatttgtaaatgggaagtaaaaatttatgccgtgcctatgtttcaggctggtaaaggatcaaataacatgatgccaacataagtgctttataaaatcttactatacttgaaaggtattcaatttttattcatcatttttacctacactgatttccagaaagaattttagttcagttacaacagaagatacataggcaataggaccgactattaaaacaaagataaaagaacaagaattatataataaaatagcagataattgtcccagaaaacctaagttaagcatagttgtaagagttgaacactaaatttagctttgaacttcctggcagctaagacagaacacaaaatacaattagacacaaaggtctccataatttacaaactgaagcatgct

SEQ ID NO: 8414 - DNA, 210 bp, Homo sapiens
ctgatccacgaggaccttcttgaggacatttgggaagcctcggaggccagacgcagggaataggcggtccagcgacaagtaccagtagtgcaggaagggacccatgctgcagcccaccgcaaacatgctcgctataagagtgtaagtcagggggctgggtcgggccggcaagttcctcagtccattccctctctccctccctggctaagg

SEQ ID NO: 8415 - DNA, 504 bp, Homo sapiens
  unsure (99): n=A,T,C or G
  unsure (167): n=A,T,C or G
  unsure (178): n=A,T,C or G
  unsure (186): n=A,T,C or G
  unsure (215): n=A,T,C or G
  unsure (231): n=A,T,C or G
  unsure (319): n=A,T,C or G
  unsure (412): n=A,T,C or G
  unsure (429): n=A,T,C or G
  unsure (430): n=A,T,C or G
  unsure (432): n=A,T,C or G
  unsure (469): n=A,T,C or G
  unsure (476): n=A,T,C or G
ctggggcttgtttagcttccagcacactctcagtcatagcatgtgtagctaaaggaagtaatgggaaggggttcatgttctctttataatgcagtggcnaaaggttctgaaagccttttaaactcgaaccagtgggggaaagatggatcttgaagctaatcctgcanagagttttatngaggccanggattgccttctaaattatgataaaacanaagtgaagagtttcanagcatcagattgagtgaaaagttgtcagattctgtattttttaacaatcttcaataatgtaaagattacttttaaaatatttaagttnaaactacttgaatagtattttgctgaagagcaagatatgcattaatcaccggttttatactgtccaaaatgaagcatccccgtgacaaaccanagtgggcagaagcatcnnanagcgtgacaggaaatcccaagactgcttccgcctcanaggcgtnccggctgcgattcgctgccctgttgtca

SEQ ID NO: 8416 - DNA, 399 bp, Homo sapiens
  unsure (9): n=A,T,C or G
  unsure (12): n=A,T,C or G
  unsure (19): n=A,T,C or G
  unsure (24): n=A,T,C or G
  unsure (31): n=A,T,C or G
  unsure (82): n=A,T,C or G
  unsure (87): n=A,T,C or G
  unsure (99): n=A,T,C or G
  unsure (165): n=A,T,C or G
  unsure (179): n=A,T,C or G
  unsure (193): n=A,T,C or G
  unsure (239): n=A,T,C or G
  unsure (258): n=A,T,C or G
  unsure (261): n=A,T,C or G
  unsure (272): n=A,T,C or G
  unsure (284): n=A,T,C or G
  unsure (308): n=A,T,C or G
  unsure (312): n=A,T,C or G
  unsure (319): n=A,T,C or G
  unsure (320): n=A,T,C or G
  unsure (327): n=A,T,C or G
  unsure (340): n=A,T,C or G
  unsure (343): n=A,T,C or G
  unsure (345): n=A,T,C or G
tgattgtanctntgttggngtatntcgtgtncaagatggaaaagtgcttttgttgttctacctgatccagttgggggagcangaatngggggtgcctgnctaacggcctctagcccatgtgcttatactgggatctgtcccgagggatctgcacctggttggcantcattttgtggtgngacgtggtaaatcncgagtgttaccatgatgacgaggcccaagatgagccccaaaatcangggcaaggtttcttccagntgntcccgctcatncactgggcattnatgctcttcactgaagacaaaatntganataatgnnaaaaggntggatgtggaccncananaggatcatggggaccgtcttctgcggatcactacaggccaatgaaatggtttgt

SEQ ID NO: 8417 - DNA, 473 bp, Homo sapiens
  unsure (15): n=A,T,C or G
  unsure (20): n=A,T,C or G
  unsure (133): n=A,T,C or G
  unsure (139): n=A,T,C or G
  unsure (150): n=A,T,C or G
  unsure (165): n=A,T,C or G
  unsure (183): n=A,T,C or G
  unsure (231): n=A,T,C or G
  unsure (306): n=A,T,C or G
  unsure (332): n=A,T,C or G
  unsure (350): n=A,T,C or G
  unsure (376): n=A,T,C or G
  unsure (440): n=A,T,C or G
  unsure (455): n=A,T,C or G
ctggcattggtctanagctntataaggccattcagcgagggaccatcaagtgcaactttgcgggggttgccttgggtgattcctggatctcccctgttgattcggtgctctcctggggaccttacctgtacancatgtntcttctcgaanacaaaggtctggcanaggtgtctaaggttgcanagcaagtactgaatgccgtaaataaggggctctacagagaggccacanagctgtgggggaaagcagaaatgatcattgaacagaacacagatggggtgaacttctataacatcttaactaaangcactcccacgtctacaatggagtcnagtctagaattcacacanagccacctaggccaggctaccaacgnctttgtgaacatggaggaggacttcatgaagccagtcattagcattgtggacgagttgctggangcagggatcaacgtnacggtgtataatggacag

SEQ ID NO: 8418 - DNA, 353 bp, Homo sapiens
  unsure (18): n=A,T,C or G
  unsure (28): n=A,T,C or G
  unsure (43): n=A,T,C or G
  unsure (44): n=A,T,C or G
  unsure (85): n=A,T,C or G
  unsure (119): n=A,T,C or G
  unsure (152): n=A,T,C or G
  unsure (178): n=A,T,C or G
  unsure (201): n=A,T,C or G
  unsure (211): n=A,T,C or G
  unsure (215): n=A,T,C or G
  unsure (263): n=A,T,C or G
  unsure (327): n=A,T,C or G
ccttctctgcttcagtcntgttcttcangatagtgtacatgcnnccaatgttgaagcaaatccgggagtgggggtcctggacggnactgaaggcatccagggctcccttccagtccttnttgtccgctgccagcaccccttcattccagagnctgatggcctccaccagggacatgantaggtagaaactaggaggccaanagagctgccngganacagagagaagacaggttggagcgtctcccctagcagggctgccttantggcccccaaggtgttcactttctgggccagatgagtagaatggggcccagcctcccttaaganaacttctcagtgttgcaaatgcatca

SEQ ID NO: 8419 - DNA, 496 bp, Homo sapiens
  unsure (363): n=A,T,C or G
tcgacgccaggagaaaggggggaggagaagccgttggatggacaggaacacagggagaggccggagggggaaacaggggatttgggcaagagagcagaagatgtaaaaggtgaccgggagcttcgaccagggcctcgagatgagccacggtccaatgggcgacgagaggaaaagacagagaagccccggttcatgttcaatatcgccgatggtggcttcacagagcttcacacactgtggcagaatgaggaacgggcagctatttcctcggggaaactcaatgagatctggcacagaagacatgactattggcttctggctgggattgtcctccatggctatgcacggtggcaggacatccanaatgatgctcaatttgccattatcaacgagccatttaaaactgaagccaataaggggaactttctggagatgaaaaataagttcctggcccggaggttcaagctcctggagcaggcgctggtgattgaggagc

SEQ ID NO: 8420 - DNA, 208 bp, Homo sapiens
  unsure (5): n=A,T,C or G
  unsure (28): n=A,T,C or G
  unsure (42): n=A,T,C or G
  unsure (51): n=A,T,C or G
  unsure (63): n=A,T,C or G
  unsure (118): n=A,T,C or G
  unsure (120): n=A,T,C or G
  unsure (135): n=A,T,C or G
  unsure (138): n=A,T,C or G
  unsure (159): n=A,T,C or G
gaatnaagcactttgtctgatggtcaanctattgcagaccanagtgaaatnataccaacattnggccaatttgaaaggactcaggaggagtatgaatacaaaaaacatgctggtcctncntttcaaccagaattntcntcaggagctgaggaggcattnatagaccatactccctatctaagtattgctactacccaccttatggatc

SEQ ID NO: 8421 - DNA, 313 bp, Homo sapiens
ccggacccggagccgccatgcccaagtgtcccaagtgcaacaaggaggtgtacttcgccgagagggtgacctctctgggcaaggactggcatcggccctgcctgaagtgcgagaaatgtgggaagacgctgacctctgggggccacgctgagcacgaaggcaaaccctactgcaaccacccctgctacgcagccatgtttgggcctaaaggctttgggcggggcggagccgagagccacactttcaagtaaaccaggtggtggagaccccatccttggctgcttgcagggccactgtccaggcaaatgccagg

SEQ ID NO: 8422 - DNA, 471 bp, Homo sapiens
  unsure (56): n=A,T,C or G
  unsure (90): n=A,T,C or G
  unsure (119): n=A,T,C or G
  unsure (198): n=A,T,C or G
  unsure (238): n=A,T,C or G
  unsure (328): n=A,T,C or G
  unsure (359): n=A,T,C or G
cctttctctatatcacctttctggaaatcctgccccaggagctggccagttctgancaaaggatcctcaaggtcattctgctcctagcangctttgccctgctcactggcctgctcttnatccaaatctagggggcttcaagagaggggcaggggagattgatgatcaggtgcccctgttctcccttccctcccccanttgtggggaataggaaggaaaggggaagggaaatactgangaccaaaaagttctctgggagctaaagatagagcctttggggctatctgactaatgagagggaagtgggcagacaagaggctggccccantcccaaggaacaagagatggtcaagtcgctngagacatatcaggggacattaggattggggaagacacttgactgctagaatcagaggttggacactatacataaggacaggctcacatgggaggctggaggtgggtacccag

SEQ ID NO: 8423 - DNA, 332 bp, Homo sapiens
  unsure (130): n=A,T,C or G
  unsure (142): n=A,T,C or G
  unsure (167): n=A,T,C or G
  unsure (168): n=A,T,C or G
  unsure (183): n=A,T,C or G
  unsure (228): n=A,T,C or G
  unsure (243): n=A,T,C or G
  unsure (262): n=A,T,C or G
  unsure (297): n=A,T,C or G
  unsure (310): n=A,T,C or G
  unsure (323): n=A,T,C or G
  unsure (325): n=A,T,C or G
aggccacctggattgcgcctaatgtgtttgagcatcacttaggagaagtcttctatttatttatttatttatttatttatttgtttgttttagaagattctatgttaatattttatgtgtaaaataaggntatgattgaatntacttgcacactctcccattatatnntattgtttattttangtcaaacccaagttagttcaatcctgattcatatttaatttgaanatagaaggtttgcanatattctctagtcatttgntaatatttcttcgtgatgacatatcacatgtcagncactgtgatagangctgaggaatccnanaaaatgg

SEQ ID NO: 8424 - DNA, 379 bp, Homo sapiens
  unsure (16): n=A,T,C or G
  unsure (39): n=A,T,C or G
  unsure (42): n=A,T,C or G
  unsure (67): n=A,T,C or G
  unsure (120): n=A,T,C or G
  unsure (177): n=A,T,C or G
  unsure (198): n=A,T,C or G
  unsure (214): n=A,T,C or G
  unsure (259): n=A,T,C or G
  unsure (284): n=A,T,C or G
  unsure (289): n=A,T,C or G
  unsure (297): n=A,T,C or G
  unsure (316): n=A,T,C or G
  unsure (320): n=A,T,C or G
aggagtaccataattntggtagctaaatatatattttanatngatgaagaagctagaaaacaggcanattcctgactgctagtttatatagaaatgtattcttttagtttttaaagtaanggcaaacttaacaatgacttgtactctgaaagttttggaaacgtattcaaacaattngaatataaatttatcatttanttataaaaatatatancgacatcctcgaggccctagcatttctccttggataggggaccanagagagcttggaatgttaaaaacanaacanaacaaaanaaaacaaggagaagttgtncaanggatgtcaattttttatccctctgtatgggttagattttccaaaatcataatttgaaga

SEQ ID NO: 8425 - DNA, 282 bp, Homo sapiens
gaggcacaaggcacaacaggctgctctgggattctcttcagccaatcttcattgctcaagtgtctgaagcagccatggcagaagtacctgagctcgccagtgaaatgatggcttattacagtggcaatgaggatgacttgttctttgaagctgatggccctaaacagatgaagtgctccttccaggacctggacctctgccctctggatggcggcatccagctacgaatctccgaccaccactacagcaagggcttcaggcaggccgcgtcagttgttgtgg

SEQ ID NO: 8426 - DNA, 389 bp, Homo sapiens
  unsure (121): n=A,T,C or G
  unsure (128): n=A,T,C or G
  unsure (148): n=A,T,C or G
  unsure (149): n=A,T,C or G
  unsure (169): n=A,T,C or G
  unsure (171): n=A,T,C or G
  unsure (241): n=A,T,C or G
  unsure (245): n=A,T,C or G
  unsure (249): n=A,T,C or G
  unsure (271): n=A,T,C or G
  unsure (294): n=A,T,C or G
  unsure (308): n=A,T,C or G
  unsure (312): n=A,T,C or G
  unsure (340): n=A,T,C or G
  unsure (371): n=A,T,C or G
  unsure (372): n=A,T,C or G
ctggtgtcaagacctgggttagaggtttgtcaaacagaggcagggcccagtcacctctttggaggggagtgatgagaaggggattttggtcacctgagagggttgagtaaacttggatcanggcacangcttctctcaccatactcanntttttgcactcactccctantngagcctactggcatcaagctctagatgccaaggctgggatggctgtggagcaggagctatggcccaagtngctntganaggggaagagacctaaaacccntagcagggaaaatactgacgctnggtgtgaacatatnactntcttttcacaagagtcctgatggggctnggctgagcttttgggtactcatccctactgnntatagctggagaggatt

SEQ ID NO: 8427 - DNA, 392 bp, Homo sapiens
  unsure (8): n=A,T,C or G
  unsure (9): n=A,T,C or G
  unsure (30): n=A,T,C or G
  unsure (41): n=A,T,C or G
  unsure (42): n=A,T,C or G
  unsure (43): n=A,T,C or G
  unsure (57): n=A,T,C or G
  unsure (59): n=A,T,C or G
  unsure (73): n=A,T,C or G
  unsure (74): n=A,T,C or G
  unsure (91): n=A,T,C or G
  unsure (100): n=A,T,C or G
  unsure (132): n=A,T,C or G
  unsure (142): n=A,T,C or G
  unsure (155): n=A,T,C or G
  unsure (163): n=A,T,C or G
  unsure (174): n=A,T,C or G
  unsure (184): n=A,T,C or G
  unsure (194): n=A,T,C or G
  unsure (305): n=A,T,C or G
  unsure (315): n=A,T,C or G
  unsure (317): n=A,T,C or G
  unsure (325): n=A,T,C or G
  unsure (327): n=A,T,C or G
  unsure (332): n=A,T,C or G
  unsure (348): n=A,T,C or G
  unsure (360): n=A,T,C or G
  unsure (365): n=A,T,C or G
  unsure (373): n=A,T,C or G
catgctgnncctgtcctggcctcaagtganccacccacctnnncctctcagtgttgngnttataggcaaccgnncccggccaaatccattntcatcactnaatgtttaaaggctacgttcagtttcctatangtgatattgntaggatctactancaaatganttggtaacctnacatctttgnattcatgtcnaaaaaaattcttttataagaacaaaaatggtactcttagcctcattcactggagtattactgaaaagcatgatattcttactctattttgggtacattatgacagagaggntattattacnanctgtcagnanaactnaggcttcttgagtaanggggattgaggnaaacntttggaanctggtgaatacatttcaag

SEQ ID NO: 8428 - DNA, 321 bp, Homo sapiens
  unsure (10): n=A,T,C or G
ctggcttccnagaggcaattctgtccttggaagccaggtttgaccatctgtaatcagccttgtgagaagtctcgtttgagggggccagggatggaacgggagggcgcatatcgtatgaggtatgggcattgtgttaagctgggggaagttgcagcttgtcctgaattacatggagaggaataaagtgggtgagtaggaggagccatttcatctgaaagcctgaggcccctctggtcccctcgataaaccccactggtgtcccaggccacaggtaacaggagaatagacatttaatgtcacagaatgtcagagcaggcaagg

SEQ ID NO: 8429 - DNA, 383 bp, Homo sapiens
  unsure (80): n=A,T,C or G
  unsure (83): n=A,T,C or G
  unsure (275): n=A,T,C or G
ccatggacaagctgaggaagatgctggttccctgcccacagaccttccaggagaatgacctgagcaccttctttcccttnatntttgaagaagaacctatcttcttcgacacatgggataacgaggcttatgtgcacgatgcacctgtacgatcactgaactgcacgctccgggactcacagcaaaaaagcttggtgatgtctggtccatatgaactgaaagctctccacctccagggacaggatatggagcaacaagtggtgttctccatgtcntttgtacaaggagaagaaagtaatgacaaaatacctgtggccttgggcctcaaggaaaagaatctgtacctgtcctgcgtgttgaaagatgataagcccactctacag

SEQ ID NO: 8430 - DNA, 476 bp, Homo sapiens
ctggcattgtggcagtgctaaagcagcgccccagattggtggctgcagcagtccaggcattttacctacgagaccctattgacctgcgagcttgtcgtgttttcaagacattcttgcctgaaacacgaataatgacatcggtcacattcactaaatgtctatatgcacaattggtgcaacaaaggtttgtgccagaccggcggagtggatacaggctgcctcctccatctgatccccagtaccgagcccatgaattgggcatgaaattggctcatggatttgagatcttatgctccaaatgtagcccacatttttctgactgcaagaaatcccttgtgactgcctcaccactctgggccagtttccttgaaagtctgaaaaagaatgattactttaagggactgatagaaggttctgctcagtaccgggaaaggctagaaatggcagagaattacttccagctctcagtagactgg

SEQ ID NO: 8431 - DNA, 495 bp, Homo sapiens
ctgttagggctgaatcttctggagaaaaaggtgccatctcaggagaatagcttttactctggtaggaatgcttccgagacaccacaaggcagcctgaacactcagttgcagggtcgggcttgcggtgggtgacccagagccaccaaagtcacatccacaactaatgagggaaatctgtaaagccagttagatagaagaattttatttttctgtgggttttgtgttgtcttttttatgttaaaaagaaatccagtttgtgtttttctatagaaaaagtaaaagatcaggttatactttaggttaggggttctatttattcctgttagtaaataaaattaacaaatttctttgtttaacaaaagattaatctttaaaccactaaaatacatagactgattgattattcaacacattggaattgatgtcggtcatagtttcctgaagcatttagttacaacctgaaggaataaaatgatttgtggaaatgcttaaaat

SEQ ID NO: 8432 - DNA, 383 bp, Homo sapiens
ccatggacaagctgaggaagatgctggttccctgcccacagaccttccaggagagtgacctgagcaccttctttcccttcatctttgaagaagaacctatcttctttgacacatgggataacgaggcttatgtgcacgatgcacctgtacgatcactgaactgcacgctccgggactcacagcaaaaaagcttggtgatgtctggtccatatgaactgaaagctctccacctccagggacaggatatggagcaacaagtggtgttctccatgtcctttgtacaaggagaagaaagtaatgacaaaatacctgtggccttgggcctcaaggaaaagaatctgtacctgtcctgcgtgttgaaagatgataagcccactctacag

SEQ ID NO: 8433 - DNA, 460 bp, Homo sapiens
  unsure (441): n=A,T,C or G
  unsure (443): n=A,T,C or G
  unsure (453): n=A,T,C or G
ccagatttctgaagaaacatggaattttctgcagtttatttatggtggagggcctgaagttatcctgcgacctccggttgttcatgttgatccagatatacttcaagcagaagaaaaaattgaagtagaaactcggtctttgtaatttttaggatgtagagagttctaatgaggaatcattttcatgtgccctgacatgtacacatgcgaaaacattcctaaaagcgtgtttatttgctttattttttttcatcatttatcccatttatttcttcttagtgggcattatggaagaatatattaaaatgtgtaatataccacaggttggtatatttagttttaaatacttaccataaagtctttcagtgtaatttttttttgagacagagtcttgctttgtcacccaggctggagtgctgtggtgttacctcagctcactgnancctccacctnctgggtt

SEQ ID NO: 8434 - DNA, 482 bp, Homo sapiens
  unsure (188): n=A,T,C or G
  unsure (204): n=A,T,C or G
  unsure (253): n=A,T,C or G
  unsure (326): n=A,T,C or G
  unsure (425): n=A,T,C or G
  unsure (440): n=A,T,C or G
  unsure (470): n=A,T,C or G
ccaatatgcctttggagcacagcctatggtttatgtttcttttatgaccacctttaatatctgtcaaacgactagacatgctatagctttacccgaaggtaatttgattgactgtgctctgctagaagatggtgtatgggtccctctcgaggtaactgccaataaatgataagtggtatttgttttanataatgcctctacctnagtggtagctttgataatggcaaattgtaattgcaagtgccattttcanaataggcattggtttattttaggaagaggataataaagttccttttagttatcaaagtaacaccttttattgntaaatctcaacttttgaagaaaacactttcaatttcttaactttttcctcagggttagtgagttagtacaactacccaaagaagtgttaaaatattganattctatatgtgtgngtttatatgtgcatctatgtattacgtatncaaaatatttca

SEQ ID NO: 8435 - DNA, 411 bp, Homo sapiens
ccttattattattattattttttttttgctgacaagtccaagatggcagtcggaactctgacccataaaaccagaaggcttagatgaagaacaaaaagaagggaaaccaaccctgcttccttttgcctgttattaatcgctgcaataaagccattagaatctaccaacatatcacccaacttgaaaagaagagagattctgaaaaatagtcagaaaagaagggtaaatggaaatgatgagtccctcccctttatggctattttaagaagcacaccatgttattcatatggcccgtgcttagcccactccctgaattgtttgattttagtggatataaaaattcttcctaagggctttcttagttccactgccagcagtagttccccatttctatttctcgttaggtctcaa

SEQ ID NO: 8436 - DNA, 430 bp, Homo sapiens
  unsure (10): n=A,T,C or G
  unsure (327): n=A,T,C or G
  unsure (333): n=A,T,C or G
  unsure (393): n=A,T,C or G
  unsure (394): n=A,T,C or G
  unsure (402): n=A,T,C or G
  unsure (405): n=A,T,C or G
aaataggaantattttaatgtttcttggggaatatgttagagaatttccttactcttgattgtgggatactatttaattatttcactttagaaagctgagtgtttcacaccttatctatgtagaatatatttccttattcagaatttctaaaagtttaagttctatgagggctaatatcttatcttcctataattttagacattctttatctttttagtatggcaaactgccatcatttacttttaaactttgattttatatgctatttattaagtattttattaggagtaccataattctggtagctaaatatatattttagatanatgaanaagctagaaaacaggcaaattcctgactgctagtttatatagaaatgtattcttttagtnnttaaagtnaangcaaacttaacaatgacttgtactc

SEQ ID NO: 8437 - DNA, 390 bp, Homo sapiens
  unsure (51): n=A,T,C or G
  unsure (62): n=A,T,C or G
  unsure (63): n=A,T,C or G
  unsure (82): n=A,T,C or G
  unsure (83): n=A,T,C or G
  unsure (147): n=A,T,C or G
  unsure (151): n=A,T,C or G
  unsure (174): n=A,T,C or G
  unsure (185): n=A,T,C or G
  unsure (220): n=A,T,C or G
  unsure (270): n=A,T,C or G
  unsure (272): n=A,T,C or G
  unsure (287): n=A,T,C or G
  unsure (309): n=A,T,C or G
  unsure (312): n=A,T,C or G
  unsure (320): n=A,T,C or G
  unsure (328): n=A,T,C or G
  unsure (334): n=A,T,C or G
  unsure (362): n=A,T,C or G
  unsure (364): n=A,T,C or G
tgttttctaagtcctctcccctaataaaacctacccaacaatagtgctttnaaaagtggtannttatcttgaagatactctnnccaaatgcaaagataaacattctttttgtctgctttataaatatgaaatatgccagatctatantatnttaatgtgcatctactttaaatnagtcatcttgnggtttttataattcccttatgttcttgcccctctncacttgaaataacaaaatgccttaattttatggattagttctcttatagnanacaggcagctatatncagcaaaaccaataaagttatnttncaactttnatagttgnaaaatntcttataacaggaatacaaaacagctangnaaacatgccacattttattttagcat

SEQ ID NO: 8438 - DNA, 436 bp, Homo sapiens
  unsure (370): n=A,T,C or G
cctggctcaacaaaagggctggggattggccctgaaaggagagagctgactgtcctggctgatggacaggagatcctcttagcactaccctaaggcaggcagttgggcattggtgtagacaacaggaaagtccaggctatagccgtactcaaaaacctttctgttccctttctgccagccctagggattgagtccacattcagcacaggactctctgggtacagctctctttaggaagacacaaattgcatggtgaagtcagttatatcctggccgcctttggtccctcccaggaagacgggcatgttttctgcttgagaggtgctgatgtaccagttggggaactgggcagactcaaattccagcttgntattgatttctatcttgttgaagacaaatcgcttttccatcttcttctttgggtaatttttgggat

SEQ ID NO: 8439 - DNA, 310 bp, Homo sapiens
gaaaaaatatataataagtacataaaactacacaaatgtttgcatttcaggattatgaattataagtcagtttgttacttcaccatagcaagatgttgtgaatccactaaaatgttctttatggggattgtaatttaaagactgaagagcaggaacgatcactggttacaactgtatgacgtggactggacaaagactcgagattaatatccaaaaaggtttatagatgggtttgaataatagataatgggtcatttttataacattttacaataattaattttatttcatcttttaatgtggggggtgg

SEQ ID NO: 8440 - DNA, 313 bp, Homo sapiens
  unsure (102): n=A,T,C or G
  unsure (162): n=A,T,C or G
aaacaatgaggggagagaatgagggacagagagaggaggggactgaggggccaaggaggttccgatgagcaaaaatggaagagaaagaacgtcagagaggangctattgggggatgaggagagagaccagagatcaagaagcatgaaggtattgagggccanagaggggacttctagggacatggagaggctgcaggacagagaaagggctcggggaacgggacagtggttctttcatttcaatgatcaaagttcccagctttttgacaccacaggggcaccctgacaattctggcaataagaacatgaaagg

SEQ ID NO: 8441 - DNA, 481 bp, Homo sapiens
  unsure (371): n=A,T,C or G
ccttggcctggccttgactttgggaaccttggaaatctttgggccttgactttgggaatcttggctgtggctgggagaaagctgggtggtcttggaggatgagcagaggtgacaggcttgggtgggaccgtttgaacatccttcctaaccagtgccttccccggcacagactggacttcgacattgtccggcgaagcagtgggtggtgtctggcagcgacttgggagatcatttcccgatgacatcacagtgtggtgttttctcttggatgcaaaccacactcttcacttggcttcaaaacagcttaagcgagcgaacagagactaggagggaacggaaactgtccgagcaggcgggcgggggcggcttangatctgtagtcctttttgctgtagggtttattgcccaaaatactatcaatctcgtggataatggaagacgacagtttcggaaggacctgtattgccccaatgttctccat

SEQ ID NO: 8442 - DNA, 467 bp, Homo sapiens
cctggacctgtgtaaaccttcaaacactcttttttacattaggtcatgaagttaaattttttactgtttctgtgctacagactcttcaaaggaaaatagttaagtcaatttcaaagaaaatgaccagcacatttttaaaacattagaaatgatttgactttgactatctactgccaaaaaaaggttaaggaatttgtaatgagaagctaaaaactttaaggaattttaaggaactcaaaacaaaaactcattaaatgtaattaaagtgaattctacaaataaagtctcttaatacatttctataatagtcacttaagacttaaattcaaacactagcaaaccacaaaatcagactgtatgactgacatccaaaagataaatataaatcaaaatccgaccccagcattagccaaggggtaggtgttcctcttgaggaaggcaggaattcctcttctgccacctgttgg

SEQ ID NO: 8443 - DNA, 391 bp, Homo sapiens
cgagatcgtaccactgcactctcgtctgagcgatagagtgagactctgcctcaaaaacaacaataacaaaaagaaaaacctgtgaggttgtaggttctttcccctttttcctttcctttttttttccccctttttcctttttcctttcctttttctctcactctgtcacccaacctggatgggagtggagtgtagtggtgtgatcatggcccactgcagccttaacttccttggctcaagtgatcctcctgcctcagcctcctgagtagttgggacaacaggcatgcactaccatgcctggctaattttttactttttgtagagacagggttttgccatgttgcccgggctggtctcaaactcctgggctcaggagatccacccacctagg

SEQ ID NO: 8444 - DNA, 430 bp, Homo sapiens
ccattcctgaatctatatttggcaaagccattctattattaacactgtaacatactgcattcaaatctaacctttgactttctcaaacgtatccctttatctcaactttacattattctgtgaaatattagacaagtagagaaaaggaaacagacccagaagttttgattcagtgatactgacccaatacacaccgtaaagttgtacagcaaaaactataactagttaagatcactcccaattttttgctcattcgcatataatacttaatatcctaaaatattgctaaaattatttaaggtagtatttataaggctattcctataaagtgttggcattttataaaatacttcagatttgaatattcctcaatctccgtgtccatccagctcttcttactcatgttaatttctctctagactctttgcag

SEQ ID NO: 8445 - DNA, 273 bp, Homo sapiens
ttttttttttgaactaaaaaagaactttatttattgagggcaaggggatgcaaacaatacaaaaatcaaaagcttatctggtatttaacttttctttctctgcttgtcaaatgagagttagattttatttttacatttgctaagtgtcctgatctgctcatgaaatccttctatgggggaagctgtggggcagattccttaagcgaccctttgggacaactcttatcagggaggagcgaactgctcatttctgcctacttctttcccttctgc

SEQ ID NO: 8446 - DNA, 510 bp, Homo sapiens
  unsure (277): n=A,T,C or G
  unsure (284): n=A,T,C or G
  unsure (432): n=A,T,C or G
  unsure (445): n=A,T,C or G
ccttggctgcaggaacagactttttccatcggcttttccagggcccaggtgaagaggccacttcagcaacagagggtacaggagagagtttaggggctggtggagattaaagtgggataagtgtatctaaatagacttatgtacactaaaccaatgaaggagaggtttggctttaagaaataaatatgcccccaaccccagaaaccaagctgctgagtaggttccacaggcgagatacacatttaacactcaccccgggccagtacacttgactggnttaattntagtacatctgtcatcactatacactgagtagaatacagtggataagcaaaggtttctccaccatggagagagatttgtgttgccacaaactgtttctgtcacccacccgtgtggggacttctgagaaagttttcttgttccaagganccatgtgactcancgcgaggccctgcctcagcagaagctctgagccagaagccacatatattgctggagacaacatgg

SEQ ID NO: 8447 - DNA, 492 bp, Homo sapiens
  unsure (13): n=A,T,C or G
  unsure (31): n=A,T,C or G
  unsure (108): n=A,T,C or G
  unsure (430): n=A,T,C or G
  unsure (431): n=A,T,C or G
  unsure (433): n=A,T,C or G
  unsure (473): n=A,T,C or G
  unsure (476): n=A,T,C or G
ctgtctgtactanacaaggttaccaagtgcngaattggttaatactaacagagagatttgctccattctctttggaataacaggacatgctgtatagatacaggcagnaggtttgctctgtacccatgtgtacagcctacccatacagggactgggattcgaggacttccaggcgcatagggtagaaccaaatgatagggtaggagcatgtgttctttagggccttgtaaggctgtttccttttgcatctggaactgactatataattgtcttcaatgaagactaattcaattttgcatatagaggagccaaagagagatttcagctctgtatttgtggtatcagtttggaaaaaaaaatctgatactccatttgattattgtaaatatttgatcttgaatcacttgacagtgtttgtttgaattgtgtnngntttttcctttgatgggcttaaaagaaattatccaaagggnganagagcagtatgccact

SEQ ID NO: 8448 - DNA, 313 bp, Homo sapiens
ctggagactcaaactcctgtacagctaccttctgggaaatagtttttgacacctatttttcagattcttgtccggaatttctgctgctcttttcaaaaaagggcattaacaattctctggaaataaagcacctgttagcctgacatatgcaaaaagcagggcggcatcacccattacgagctcccccagccagcagtcagtattggattggccttgcctggctggtggcagtttgggagaaacagccaaagaggttagtttatttcaacaccaaattagaccatggcccatttccaacgggtctctttaaagg

SEQ ID NO: 8449 - DNA, 428 bp, Homo sapiens
  unsure (10): n=A,T,C or G
  unsure (104): n=A,T,C or G
  unsure (146): n=A,T,C or G
  unsure (165): n=A,T,C or G
  unsure (178): n=A,T,C or G
  unsure (227): n=A,T,C or G
  unsure (315): n=A,T,C or G
  unsure (318): n=A,T,C or G
  unsure (319): n=A,T,C or G
  unsure (332): n=A,T,C or G
  unsure (359): n=A,T,C or G
  unsure (379): n=A,T,C or G
  unsure (388): n=A,T,C or G
  unsure (417): n=A,T,C or G
cctggctcancaaaagggctggggattggccctgaaaggagagagctgactgtcctggctgatggacaggagatcctcttagcactaccctaaggcaggcagtngggcattggtgtagacaacaggaaagtccaggctatagccgnactcaaaaacctttctgtnccctttctgccanccctagggattgagtccacattcagcacaggactctctgggtacagctntctttaggaagacacaaattgcatggtgaagtcagttatatcctggccgcctttggtccctcccaggaagacgggcatgttttctgcntgnnaggtgctgatgtnccagttggggaactgggcagactcaanttccggcttgttattgattnctatcttgntgaagacaaatcgcttttccatcttcttnctttgggtaat

SEQ ID NO: 8450 - DNA, 383 bp, Homo sapiens; identical to SEQ ID NO: 7947

SEQ ID NO: 8451 - DNA, 68 bp, Homo sapiens
  unsure (16): n=A,T,C or G
  unsure (17): n=A,T,C or G
  unsure (40): n=A,T,C or G
  unsure (59): n=A,T,C or G
caagcttttttttttnntttttttttttttttttgctttnaatatattttattctgacnaagttacaa

SEQ ID NO: 8452 - DNA, 368 bp, Homo sapiens; identical to SEQ ID NO: 8376

SEQ ID NO: 8453 - DNA, 608 bp, Homo sapiens
  unsure (519): n=A,T,C or G
  unsure (527): n=A,T,C or G
ccacactctacttctgcttctgccacctatggggtcgaggcaggtgtggtgccttggctaagtccacagacttctgagaggcccacgctttcttcttctccagaaataaaccctgaaactcaagcagctttaatcagagggcaggattccacgatagcagcatcagaacagcaagtggcagcgagaattcttgattccaatgatcaggcaacagtaaaccctgtggaatttaatactgaggttgcaacaccaccattttcccttctggagacttctaatgaaacagatttcctgattggcattaatgaagagtcagtggaaggcacggcaatctatttaccaggacctgatcgctgcaaaatgaacccgtgccttaacggaggcacctgttatcctactgaaacttcctacgtatgcacctgtgtgccaggatacagcggagaccagtgtgaacttggtaagatggtacttggctgaaaaggtgcagttctttcacagaagatatattgggggagaatntatgttgncgaatcaatcagagatttcaaagaaacccatatgaagattaattatatgttaaatgaagttaaaatctgagggtaattaac

SEQ ID NO: 8454 - DNA, 323 bp, Homo sapiens
  unsure (8): n=A,T,C or G
  unsure (24): n=A,T,C or G
  unsure (81): n=A,T,C or G
  unsure (142): n=A,T,C or G
  unsure (310): n=A,T,C or G
ctgtgttnccatgggacccctctnattcattagccttgggcttacactgagttctccacatgaaactgatgacttgtccanaacaactgcccagcaaaagctaagactcattcaacttgaaggcttgaaaacccaacaagtnaaccttttctaccttctttatgctctcttgcaagtccttatataggtttatattttcctggccccataggggcagaccttatagaggcaaagacctttgaattctggggagatggtgatcaccttattaactcccttctgcatacgtggattacagaggagtaagcanaccaagagcacag

SEQ ID NO: 8455 - DNA, 264 bp, Homo sapiens
  unsure (61): n=A,T,C or G
  unsure (72): n=A,T,C or G
  unsure (202): n=A,T,C or G
ccacaacaactgacgcggcctgcctgaagcccttgctgtagtggtggtcggagattcgtanctggatgccgncatccagagggcagaggtccaggtcctggaaggagcacttcatctgtttagggccatcagcttcaaagaacaagtcatcctcattgccactgtaataagccatcatttcactggcgagctcaggtacttntaccatggctgcttcagacacttgagcaatgaagattggctgaagagaatcccagagcagcc

SEQ ID NO: 8456 - DNA, 434 bp, Homo sapiens
  unsure (54): n=A,T,C or G
  unsure (75): n=A,T,C or G
  unsure (89): n=A,T,C or G
  unsure (92): n=A,T,C or G
  unsure (105): n=A,T,C or G
  unsure (111): n=A,T,C or G
  unsure (134): n=A,T,C or G
  unsure (139): n=A,T,C or G
  unsure (154): n=A,T,C or G
  unsure (199): n=A,T,C or G
  unsure (248): n=A,T,C or G
  unsure (318): n=A,T,C or G
  unsure (323): n=A,T,C or G
  unsure (338): n=A,T,C or G
  unsure (374): n=A,T,C or G
  unsure (393): n=A,T,C or G
ctgcatccacagacttcaactacatgattacttctttgcccattcttctctttnttttctttcccgaataacctntttcagatacggtncanggtagaaattttnctcttnatatttggtccactgctctttangcaanatctgatgcttcaanattcaggtccagtgccctcttaatgcgaaacatcctgtcattatnaaggttctcaggaagtcttcttatggcttcttttacatcttcatcctcntatattgtatcatctcgcattaaccctatgatagatgacaaagttagattgcacatgcatctcaaaaatngcggnttttttaaattagtnaaatacctttatgacttataacttacaacttttggngaactatcgaattcaaatnactaggttcaatggaaattcaatgcatttcatacattatag

SEQ ID NO: 8457 - DNA, 490 bp, Homo sapiens
cctgagcagacactgctgggggagagagaaagttcacatccccccaccaagcacggtctcagattaggttattacaaagggcgagggggaggagggcatcccaggagtctaacatccaacccgacctatgtagaatgacgggtgaccacgccctgacccagccacacacttgaaccctgggacttcagtgaggtaggtggtatcagccccatttcacaggtgggcaaactgaggcagaatgaaatgcaatagctcgcttttaataacaacatacaaaagtctggagaaggccccaaagtagtcccctgttcccagagcccaaagaataaacagatgggagaacaagaccctcctcttccttttcccccacagagaagatccctaaacacatcaccggaacccctcaaatattcctgggaacttcaaacaaaaaaacatagcaacaaagagacccagcttccagtttattcccagttgggtaggggacagg

SEQ ID NO: 8458 - DNA, 338 bp, Homo sapiens
  unsure (40): n=A,T,C or G
  unsure (111): n=A,T,C or G
  unsure (149): n=A,T,C or G
  unsure (190): n=A,T,C or G
  unsure (191): n=A,T,C or G
  unsure (192): n=A,T,C or G
  unsure (200): n=A,T,C or G
  unsure (203): n=A,T,C or G
  unsure (204): n=A,T,C or G
  unsure (218): n=A,T,C or G
  unsure (221): n=A,T,C or G
  unsure (231): n=A,T,C or G
  unsure (238): n=A,T,C or G
  unsure (256): n=A,T,C or G
  unsure (258): n=A,T,C or G
  unsure (325): n=A,T,C or G
ctgcccgcaggccccaggtcttcatggagttgctccttanttctctatgaaacacctcctctgctgagaagtccccgtggtgcaggagcagtaaggtatccccagacttgntggagaatgggactagctggtcaccccgctgccgggcnatcacagtgaccacgtgagctgggcccaggtcagggtcatnnncgctcagnccnncataggaaaagganacncgcaagtctnccacctntggatacttgggattttngntgtggtagaaaaagtctccacggcgaatgatgtccacatgagggtcctccagcttggataggctcanggacttgaagttg

SEQ ID NO: 8459 - DNA, 477 bp, Homo sapiens
  unsure (210): n=A,T,C or G
  unsure (258): n=A,T,C or G
  unsure (314): n=A,T,C or G
  unsure (329): n=A,T,C or G
  unsure (351): n=A,T,C or G
  unsure (394): n=A,T,C or G
  unsure (432): n=A,T,C or G
  unsure (467): n=A,T,C or G
ccagtggaatgatgttccctgcaattaccatctcacctatacgtgcaagaaaggaacagtcgcttgcggccagccccctgttgtagaaaatgccaagacctttggaaagatgaaacctcgttatgaaatcaactccctgattagataccactgcaaagatggtttcattcaacgtcaccttccaactatccggtgcttaggaaatggaanatgggctatacctaaaattacctgcatgaaccgtaagtggtcctttanaaagaatggactaccgtgctataacaactactagacaccttcattttacggctgtngtatcggcagtttanggtatggagcaagtaatattgngtgttttctttttttctttctttccttccatgtagcatctgcntaccaaaggacttattctatgaaatactttaaaaattnctcatcaacaaaggacaattcaataaatacatccnaacatgatca

SEQ ID NO: 8460 - DNA, 429 bp, Homo sapiens
  unsure (18): n=A,T,C or G
  unsure (20): n=A,T,C or G
  unsure (21): n=A,T,C or G
  unsure (38): n=A,T,C or G
  unsure (40): n=A,T,C or G
  unsure (72): n=A,T,C or G
  unsure (133): n=A,T,C or G
  unsure (165): n=A,T,C or G
  unsure (188): n=A,T,C or G
  unsure (224): n=A,T,C or G
  unsure (254): n=A,T,C or G
  unsure (312): n=A,T,C or G
  unsure (338): n=A,T,C or G
  unsure (374): n=A,T,C or G
  unsure (375): n=A,T,C or G
  unsure (399): n=A,T,C or G
ccaaaaaaaagaaggccntnntgacctgccacataatncnttggggaaagaaatctaatattcatagcacanaagaactcaaagaggataaaattctggaagccatggaatggtactcagaagtgcctgcggngaaacactccatatgcttttctcaaacacatntgttaaaaacaaatgtagttctnaaaaatattgagatgccatgttttaaatctctgcangacacaagaggccactcaggttttctaatnttatttgaacacaaaatatttaattttttgcatgtagagaataagaggtaatcattancctgaaaagagaggatttataatcancattatgcagaaagaaagcaaaattacaaataccanncctactcacatgaaaatttttcangtttacgctgatatatatctgagtgcttat

SEQ ID NO: 8461 - DNA, 423 bp, Homo sapiens
  unsure (395): n=A,T,C or G
  unsure (413): n=A,T,C or G
gcacgccctgcaagggaggtatccgttacagcactgatgtgagtgtagatgaagtaaaagctttggcttctctgatgacatacaagtgtgcagtggttgatgtgccgtttgggggtgctaaagctggtgttaagatcaatcccaagaactatactgataatgaattggaaaagatcacaaggaggttcaccatggagctagcaaaaaagggctttattggtcctggcattgatgtgcctgctccagacatgagcacaggtgagcgggagatgtcctggatcgctgatacctatgccagcaccatagggcactatgatattaatgcacacgcctgtgttactggtaaacccatcagccaagggggaatccatggacgcatctctgctactggccgnggtgtcttccatgggatngaaaatttca

SEQ ID NO: 8462 - DNA, 154 bp, Homo sapiens
  unsure (138): n=A,T,C or G
  unsure (143): n=A,T,C or G
agcagcagcttaaatatgaggcaagcagtcaggggttagccatgcctggggctgggttggggtcatgaggctacaggcacagactgtccccaggtggacagaagttggagcaggaagaggaggaggaaggggccgcanagcancctgggtcaga

SEQ ID NO: 8463 - DNA, 251 bp, Homo sapiens
ccagtcccagcagtctgactttttttttctttaagagacagggtctcactctgttgctcaggctggagtgtagtggcgcgatcatagctcgctgcagcctcaaactcctgggctccagtgatcctcccctcagcctcctgagtacaggtgcacgtcactgcagccagccagtctgacatcttgattccagggtggaaaacccttcttgtctccatggtaatggctgggctctcccaccctccaatagttca

SEQ ID NO: 8464 - DNA, 379 bp, Homo sapiens
ctgaaaaaaatcatgcagacatttgttacacagcagtggaaacagagcaaagaaaaatccaattgcctgcacaataaaaagttgtcagagaagaaagtgaagtctcccctgcatttattttctactttgcgcaggtcgccaagttatcctccccctggttgtggcaaaagcaaatccaaactgaaatctgagcaggacggaatctccaaaacgcataagctgctgcggaggacttgttccagcacagtcaagactgatgatgtgtgtgtcacaaagtcacacaggacctttggccgctccttgtccagcgatcccagggcggagcaggctatgacagcaattaaatcgcacaaacttttgaaccgtccttgccctgcag

SEQ ID NO: 8465 - DNA, 514 bp, Homo sapiens
cctttgagagatatgggcatagaattcaccctcaaaaagctcatgttctgattaaccacatcaacagttaagtaatatggaagtcaagtaacaaagacaataacacaactaattataaacaagacatataagcagtttaataccaccttagtgattctgattgactcatattgataacatattccacatggtcatgcacaataactccatttaccctaaatcatggattagtttccatcaaaacaccactccatttgagttttaaaattaaaagtattctccagcacaattacaggattttgaaaaccagaacacagtatagaaacataaaatatatataaaattaaccaaaattaaaataagacaatgtattaatagataatcatactataaacacacaatcactggctgaactagacaaggaaagggtaaattctttgagggcagggccttttccttgtcctgcagctaggaacaaagcacccagaacaacagatgtcatgggcttgataaa

SEQ ID NO: 8466 - DNA, 408 bp, Homo sapiens
  unsure (19): n=A,T,C or G
  unsure (222): n=A,T,C or G
  unsure (247): n=A,T,C or G
  unsure (378): n=A,T,C or G
ctgggagatgctggatacntattatttggagtggtgttatttgtttgggaactcttacctaccaccttagtcgtttatttcttccgagttagaaatcctacaaaggaccttaccaaccctggaatggtccccagccatggattcagtcccagatcttatttctttgacaaccctcgaagatatgacagtgatgatgaccttgcctggaacattgcccctcanggacttcagggaggttttgctccanattactatgattggggacaacaaactaacagcttcctggcacaagcaggaactttgcaagactcaactttggatcctgacaaaccaagccttgggtagcatcagttaacagttttatggacgattcctcanatgaaaagcttcagaaaagcatagtgacag

SEQ ID NO: 8467 - DNA, 136 bp, Homo sapiens
gcagtgaagcctctggacacacagagatcccccagcccagtgctctgccaggaatagacgtcggctcatctgtaatgtccccacaggattcttttaaggaaattcatgtaaatattgaagcgactttcaaaccatc

SEQ ID NO: 8468 - DNA, 470 bp, Homo sapiens
  unsure (95): n=A,T,C or G
  unsure (343): n=A,T,C or G
  unsure (424): n=A,T,C or G
  unsure (466): n=A,T,C or G
  unsure (468): n=A,T,C or G
ccagttcttagctgtggatcccaaagggcgagccgttatgattagtgccattgagaaacagaaattggtgtatattttgaacagagatgctgcancccgacttaccatttcatctcccctggaagcccacaaagcaaacactttagtgtatcatgtagttggagtagatgtcggatttgaaaatccaatgtttgcttgtctggaaatggattatgaggaagcagacaatgatccaacaggggaagcagcagctaatacccagcagacacttactttctatgagctagaccttggtttaaatcatgtggtccgaaaatacagtgaacctttggaggaacacggnaacttccttattacagttcctggagggtcagatggtccaagtggagtactgatctgctctgaaaactatattacttacaanaactttggtgaccagccagatatccgctgtccaattcccagnangc

SEQ ID NO: 8469 - DNA, 492 bp, Homo sapiens
  unsure (9): n=A,T,C or G
  unsure (13): n=A,T,C or G
  unsure (459): n=A,T,C or G
ctgtctgtnctanacaaggttaccaagtgcggaattggttaatactaacagagagatttgctccattctctttggaataacaggacatgctgtatagatacaggcagtaggtttgctctgtacccatgtgtacagcctacccatgcagggactgggattcgaggacttccaggcgcatagggtagaaccaaatgatagggtaggagcatgtgttctttagggccttgtaaggctgtttccttttgcatctggaactgactatataattgtcttcaatgaagactaattcaattttgcatatagaggagccaaagagagatttcagctctgtatttgtggtatcagtttggaaaaaaaaatctgatactccatttgattattgtaaatatttgatcttgaatcacttgacagtgtttgtttgaattgtgtttgttttttcctttgatgggcttaaaaganattatccaaagggagaaagagcagtatgccact

SEQ ID NO: 8470 - DNA, 429 bp, Homo sapiens
  unsure (245): n=A,T,C or G
  unsure (282): n=A,T,C or G
  unsure (289): n=A,T,C or G
  unsure (371): n=A,T,C or G
  unsure (416): n=A,T,C or G
  unsure (421): n=A,T,C or G
ccaaattccagcatgcctggttcaagagaagttcagatacacccggactcggatcaaatctcagggcttcatgggaattcatttcactctgaagatgaaattgaatatgaaaaccaaaaaaggctggaagaagaggaggacttgaatgtgcttacatttgaagatcttctttgctttgcatatcaagttgccaaaggaatggaatttctggaatttaagtcgtgtgttcacagagacctggccgncaggaacgtgcttgtcacccacgggaaagtggtgaanatatgtnactttggattggctcgatatatcatgagtgattccaactatgttgtcaggggcaatgcccgtctgcctgtaaaatggatggnccccgaaagcctgtttgaaggcatctacaccattaagagtgatgnctggncatatgga

SEQ ID NO: 8471 - DNA, 512 bp, Homo sapiens
  unsure (447): n=A,T,C or G
  unsure (450): n=A,T,C or G
cctgagatgaaatttaaagaatatgtagaatctaggtaagtggataaaaggtctgggggcaggggaaaggagagcatttcattgtgaatcaaggaatttctccacctgttttaactcttccatatgacatcaaagagatgtcacttgcagctagcatttcagtgatgttttcttactaataatatcgtgataaaagaaacattgactataagaaataggaatgggtctcataaaaggaaacagcaaaacccccaaactaaaaaacaacgcaggctatttctctcttctctccttttgcttggcactcatgagatgctaggtgtggaagtcagccaactgaaaaagagaggtggctgaagaaggtggggaggctgaagccagttaaataggatggtccaattcacagacggcgaggctacagtgcaaataggactctttcaacttgancangaccccattacttcactggagttagaaagaaaggagagcgtagactttttgaactttctata

SEQ ID NO: 8472 - DNA, 301 bp, Homo sapiens
  unsure (192): n=A,T,C or G
  unsure (246): n=A,T,C or G
cctgattatctaaaagctatttggaatgtaatcaactgggagaatgtaactgaaagatacatggcttgcaaaaagtaaaccacgatcgttatgctgagtatgttaagctctttatgactgtttttgtagtggtatagagtactgcagaatacagtaagctgctctattgtagcatttcttgatgttgcttantcacttatttcataaacaacttaatgttctgaataatttcttactaaacatttngttattgggcaagtgattgaaaatagtaaatgctttgtgtgattgaatctgattg

SEQ ID NO: 8473 - DNA, 449 bp, Homo sapiens
cctggctcaacaaaagggctggggattggccctgaaaggagagagctgactgtcctggctgatggacaggagatcctcttagcactaccctaaggcaggcagttgggcattggtgtagacaacaggaaagtccaggctatagccgtactcaaaaacctttctgttccctttctgccagccctagggattgagtccacattcagcacaggactctctgggtacagctctctttaggaagacacaaattgcatggtgaagtcagttatatcctggccgcctttggtccctcccaggaagacgggcatgttttctgcttgagaggtgctgatgtaccagttggggaactgggcagactcaaattccagcttgttattgatttctatcttgttgaagacaaatcgcttttccatcttcttctttgggtaatttttgggatctacactctccag

SEQ ID NO: 8474 - DNA, 428 bp, Homo sapiens
  unsure (52): n=A,T,C or G
  unsure (192): n=A,T,C or G
  unsure (207): n=A,T,C or G
  unsure (217): n=A,T,C or G
  unsure (264): n=A,T,C or G
  unsure (276): n=A,T,C or G
  unsure (396): n=A,T,C or G
tttttttttcaattaagctatttttatttaacatgtaatagtcataaagcanctccatatatttagttttctgatatcctaatgtatttccacaaaccttttaagtctacaattttatatagttttccatcagggaggcaagatatatataatttctttttatatttaactaaaggttttaagagggcttantctctaaatcagtancaattagtcntaacaccatacaaacacatttaaatattcaggaaagaggttgttaanattattgcttantcttataaaatggtgaattttaaccaaattgatacctctgtaatcttatttatgtttcctataacatcatactgcttggcaagtaatgtaagttttgacataatttaaaaattcaagtanttgtaaacaaattctaatttgttaaacaattc

SEQ ID NO: 8475 - DNA, 364 bp, Homo sapiens; identical to SEQ ID NO: 8232

SEQ ID NO: 8476 - DNA, 240 bp, Homo sapiens
  unsure (11): n=A,T,C or G
  unsure (16): n=A,T,C or G
  unsure (38): n=A,T,C or G
  unsure (55): n=A,T,C or G
  unsure (67): n=A,T,C or G
  unsure (71): n=A,T,C or G
  unsure (88): n=A,T,C or G
  unsure (119): n=A,T,C or G
  unsure (131): n=A,T,C or G
  unsure (143): n=A,T,C or G
  unsure (151): n=A,T,C or G
  unsure (152): n=A,T,C or G
  unsure (170): n=A,T,C or G
  unsure (210): n=A,T,C or G
  unsure (230): n=A,T,C or G
ctgctgttacnttcanagaataagagcaaccataactnacatcaagccaatttanattagactaatntaanttgtctaattaaattgnctctagatgagagcccaatctcatctagaantgaagaaatctntctattgacagntattagtnnaagaggttctaatacccngtgtaaggcagaaatatacattggagttagtctgtctgangtatgcagaacaaatggcantatcatgaag

SEQ ID NO: 8477 - DNA, 441 bp, Homo sapiens
  unsure (159): n=A,T,C or G
  unsure (194): n=A,T,C or G
  unsure (356): n=A,T,C or G
  unsure (371): n=A,T,C or G
ctgccgctgctcgttgttttttctgcaatgatatttgggactattacaaatcaagatctgcctgtgatcaagtgtgttttaatcaatcataagaacaatgattcatcagtggggaagtcatcatcatatcccatggtatcagaatccccggaagacctngggtgtgcgttgagaccccagagctcagggacagngtacgaagctgccgctgtggaagtggatgtatctgcttccatcacactgcaagtgctggtcgatgccccagggaacatttcctgtctctgggtctttaagcacagctccctgaattgccagccacattttgatttacaaaacagaggagttgtttccatggncattttgaaaatggnagaaacccaagctggagaatacctactttttattcagagtgaagctaccaattacacaatattgtttaca

SEQ ID NO: 8478 - DNA, 515 bp, Homo sapiens
ccagatgacctgttgtctaccaaagaaagctgggtagaagcaactcctagacaagttgtagagctctcagggagttcttcgattccaattacagaaggctctggagaagcagaagaagatgaagatacaatgttcaccatggtaactgatttatcacagagaaatactactgatacactcattactttagacactagcaggataatcacagaaagcttttttgaggttcctgcaaccaccatttatccagtttctgaacaaccttctgcaaaagtggtgcctaccaagtttgtaagtgaaacagacacttctgagtggatttccagtaccactgttgaggaaaagaaaaggaaggaggaggagggaactacaggacctgatcgctgcaaaatgaacccgtgccttaacggaggcacctgttatcctactgaaacttcctacgtatgcacctgtgtgccaggatacagcggagaccagtgtgaacttgattttgatgaatgtcactctaatccctg

SEQ ID NO: 8479 - DNA, 189 bp, Homo sapiens
  unsure (19): n=A,T,C or G
  unsure (27): n=A,T,C or G
  unsure (36): n=A,T,C or G
  unsure (118): n=A,T,C or G
  unsure (141): n=A,T,C or G
  unsure (166): n=A,T,C or G
  unsure (167): n=A,T,C or G
  unsure (169): n=A,T,C or G
cctgggtgatacatggcgnaagagaanattccaganacttatgccaggatcccaccataaaagagctggaatcgattataagcaaaaggaatattcaattttcctgcaagaatatctncagacctgacaagtttcttcagngtgtgaaaaatcctgaggattcatnntngcacatctgagatctgagcc

SEQ ID NO: 8480 - DNA, 272 bp, Homo sapiens
  unsure (212): n=A,T,C or G
agggcccaaggcagccccctgggttctccaaccactgcaagcaaggtctggggacaaccttgacaacccccagccttcttgctgggctggcgctgctgccactcaaataggacataggacaagcttgtctgacatcagctactggagttaaattatggctttataggactcaaacctgttgtttttcccaactctgttctctccctccaatncaacccctgccacagtgcatgggcaggctagccttgaatggactggacagacaccaacag

SEQ ID NO: 8481 - DNA, 349 bp, Homo sapiens
  unsure (32): n=A,T,C or G
  unsure (178): n=A,T,C or G
  unsure (268): n=A,T,C or G
  unsure (280): n=A,T,C or G
  unsure (325): n=A,T,C or G
  unsure (334): n=A,T,C or G
ccaggctcccaggtgacttacgttaatagcanacttctagttagaagaggagaatttatttcattaaaaaaaaaaaataagtcaaacagttcaagaaagtattcatttatgtaaaagaagtcaattggtatgttactaaagataataggaagaaaattagctcactattttagttgcntactgatgattttaaggtttaaataattaagatttaaatataccgtatgtaaatgtagaagtctgtatcgtaataaatctgttgctaagnaaaatgggaatncatgacaacgaggaatgtaggtattaaaaatgtcagaattagaangagaacagnaaaagagcaaaagct

SEQ ID NO: 8482 - DNA, 412 bp, Homo sapiens
  unsure (353): n=A,T,C or G
  unsure (372): n=A,T,C or G
  unsure (403): n=A,T,C or G
tgtacatgggggtaggccggggcacaaagcctgttcctaagactaacttgggaccaaggagccctgaggagttggggcacgggctccacagaaacatctaggcttcggtaaccaatgcacagtgacgctcccatgttgacttaaaaagcagataaaaacaaccaaacaaaaagtccctaccattgcacccctgtagtaggccgttgtgatcgtccgaaaccgttcctgaccggctgtgtccctaaacatgaagagaagggatattagcaacattaaaggaaaataactgtcctcagtaggagacaaggagcatctacccgggatgcctggctttctcaccgttcagccactgngataccttcttctgctaangcagcaccttctaatctccctattattacanggaaggaca

SEQ ID NO: 8483 - DNA, 445 bp, Homo sapiens
ctgaggaagctcttcattggagggttgagctttgaaacaactgatgagagcctgaggagccattttgagcaatggggaacgctcacggactgtgtggtaatgagagatccaaacaccaagcgctccaggggctttgggtttgtcacatatgccactgtggaggaggtggatgcagctatgaatgcaaggccacacaaggtggatggaagagttgtggaaccaaagagagctgtctccagagaagattctcaaagaccaggtgcccacttaactgtgaaaaagatatttgttggtggcattaaagaagacactgaagaacatcacctaagagattattttgaacagtatggaaaaattgaagtgattgaaatcatgactgaccgaggcagtggcaagaaaaggggctttgcctttgtaacctttgacgaccatgactccgtggata

SEQ ID NO: 8484 - DNA, 357 bp, Homo sapiens
ccaaaggcttccctcacgtgcaggtagggaatggtgtggtccaggaccgcttgcatgagccaggaatcttgcagtcttcaaagattagctcacaggtgttagagcccctcatccccagcttgtccagcttcttagaggtgctaaagccaggcatacccttctccacaatgaaggctgtgatgccccgagaagctggcacagcagccagatctgtcttggcatagacaatcaggacgtcagcatcagggccattagtgatccagaacttgttgccattcaggatgtagtgatttcctttcttttccgctttgagcttcatagagacaacatcagagcctgcattgggctcactcatgg

SEQ ID NO: 8485 - DNA, 494 bp, Homo sapiens
ccagaatagaagtgtcttatctaacctgaccagctcaaggtaaaagacctcaagaatcggacattggctgtgtctgtgtctccaaagaaaatgtcccagtcagctcaccctactgtgaaacccatattgaatccagaacttctatttagtttgtgtcctttttttctcataaacaaatttgttatagtcttactaagatataattggcatagaataaactttacacttaaagtgaaaaacttgagttctgaggcatgtatatatttccacagtcgccaccacagtcaggtaatcattcccctaaattttttgtgcctccttatcttccttcccttcccctaccccagctcctcctttcctcaggcagccccgatctgctttctgtcgctatagaataatttgacttttctggaattttatgtacatggaatcatacagtatgtgttcttttttggtctgacattcactcaccataattgagtttcatccatgtt

SEQ ID NO: 8486 - DNA, 505 bp, Homo sapiens
  unsure (432): n=A,T,C or G
ccaactaatttagttttgatgcactgtcagatagactaatcactgtctaagattttcctgaatctctgcttcatgttatgcttttcaaggagatgataatagcttgttaaccaccattcacagctcttcaactactcacaagccttcaagaactcaccttaaggagcccactgaatattaaatattaaacagctacaaaagagtgctactaagacaattttgctttgatgagctggataaaatcaagtcagaggttcagtataaactctgacaggactttaataattcctaatatgtatgaaatgaaaatgaaaatggtcaaaatcatttaggaactctcaatttttcaagactcgaagcaaattaaccatggactttatacttgtaattagttaagaagaaaagctattgcctaaaagcagttatgtgtgngtaattcttgacttcggatatctaatttcttctattccaaggtatttagttctaaggtaactaaaatagtaac

SEQ ID NO: 8487 - DNA, 469 bp, Homo sapiens
  unsure (179): n=A,T,C or G
  unsure (323): n=A,T,C or G
  unsure (402): n=A,T,C or G
  unsure (404): n=A,T,C or G
  unsure (444): n=A,T,C or G
ctgtctcttacttttaaccagtgaaattgacctgcccgtgaagaggcgggcataacacagcaagacgagaagaccctatggagctttaatttattaatgcaaacagtacctaacaaacccacaggtcctaaactaccaaacctgcattaaaaatttcggttggggcgacctcggagcanaacccaacctccgagcagtacatgctaagacttcaccagtcaaagcgaactactatactcaattgatccaataacttgaccaacggaacaagttaccctagggataacagcgcaatcctattctagagtccatatcaacaatanggtttacgacctcgatgttggatcaggacatcccaatggtgcagccgctattaaaggttcgtttgttcaacgattaaantnctacgtgatctgagttcagaccggagtaatccaggtcggnttctatctacttcaaattcctccct

SEQ ID NO: 8488 - DNA, 380 bp, Homo sapiens
  unsure (347): n=A,T,C or G
ctgatgatggacagtgaaactggtcgatccaagggatatggatttattacattttctgactcagaatgtgccaaaaaggctttggaacaacttaatggatttgaactagcaggaagaccaatgaaagttggtcatgttactgaacgtactgatgcttcgagtgctagttcatttttggacagtgatgaactggaaaggactggaattgatttgggaacaactggtcgtcttcagttaatggcaagacttgcagagggtacaggtttgcagattccgccagcagcacagcaagctctacagatgagtggctctttggcatttggtgctgtggcagatttgcaaacaanactttcccagcagactgaagcttcagctttagc

SEQ ID NO: 8489 - DNA, 544 bp, Homo sapiens
  unsure (20): n=A,T,C or G
  unsure (341): n=A,T,C or G
  unsure (356): n=A,T,C or G
  unsure (442): n=A,T,C or G
  unsure (456): n=A,T,C or G
  unsure (508): n=A,T,C or G
  unsure (530): n=A,T,C or G
  unsure (531): n=A,T,C or G
ccatcggtgctgaaattgancattttaaatagtacagtaggctggtatacattaggaaatggactgcactggaggcaaatagaaaactaaagaaattagataggctggaaatgcttactttctgctctcattttctttcattttgtctgctgtctttttgaatgccaatactttcatttaaaatgttttgggagcacggcaacccaaaatgactgaacggtggtccaaaaatccaaaccaactgataattacttctcaaggtgataggaaaggcacaggaagttaggactttggctgaaatgatgaaaacacatgttcgccattttagggatcagcgcctngactcctgccacctncggctccaacgatgatcatgtttggatgtatttattgaattgtcctttgctgatgaggaatttttaaagtatttcatagaataagncctttggtatgcanatgggttcatgcaggtaattttaggtatagcccatcttgcatttcctaagcnccggatagttggaaggtgacgnngaatgaaaccatc

SEQ ID NO: 8490 - DNA, 597 bp, Homo sapiens
  unsure (580): n=A,T,C or G
ccatataatttttagctacaaaagtttaagcaaaaacaaactctgcaatgatgtggaatagcagaaaagatcctttgcaggcaagagactctagcatatttacctatgtagttaacaggctgcagacctggttgctacatacctgtattgtgtatttcctcagcaatatacatgccttctcgataggttagtcccccgacaacaggagttcctgtggctggagccagtgtagggtcaaatgcatcaatatcaaaactcaaatggattggtctttgtctcctaaaaaggaagaggataaaataatacttaaaataatacttaactggttgtccttggacactcatccttcttatggttgcaactccttgattttgttgctattagtcctagtactttgttaataaagctgttaatacatttccaggcttcctattcttggaagttactgagattggcaatattaacttcctacataccacttcatgatactgccatttgttctgcatacctcagacagactaactccaatgtatatttctgccttacactgggtattagaacctcttatactaataactgncaatagagagatttctt

SEQ ID NO: 8491 - DNA, 173 bp, Homo sapiens
  unsure (13): n=A,T,C or G
  unsure (22): n=A,T,C or G
  unsure (24): n=A,T,C or G
  unsure (27): n=A,T,C or G
  unsure (35): n=A,T,C or G
  unsure (83): n=A,T,C or G
  unsure (103): n=A,T,C or G
  unsure (106): n=A,T,C or G
  unsure (109): n=A,T,C or G
  unsure (144): n=A,T,C or G
  unsure (156): n=A,T,C or G
aagaagatggaanagcgatttntnttnaacaaganagaaatcaataacaagctggaatttgagtctgcccagttccccaactngtacatcagcacctctcaancanaanacatgcccgtcttcctgggagggaccaaaggcggncaggatataacngacttcaccatgcaatt

SEQ ID NO: 8492 - DNA, 312 bp, Homo sapiens
  unsure (8): n=A,T,C or G
  unsure (17): n=A,T,C or G
  unsure (18): n=A,T,C or G
  unsure (33): n=A,T,C or G
  unsure (80): n=A,T,C or G
  unsure (96): n=A,T,C or G
  unsure (99): n=A,T,C or G
  unsure (105): n=A,T,C or G
  unsure (110): n=A,T,C or G
  unsure (148): n=A,T,C or G
  unsure (171): n=A,T,C or G
  unsure (177): n=A,T,C or G
  unsure (179): n=A,T,C or G
  unsure (195): n=A,T,C or G
  unsure (209): n=A,T,C or G
  unsure (219): n=A,T,C or G
  unsure (244): n=A,T,C or G
  unsure (254): n=A,T,C or G
  unsure (304): n=A,T,C or G
acaagctnttttttttnnttttttttttttttngctttgaaatgatttattcacctgggaaagtgatcacaacttgctgntaattaaaaccaacantanaacagngagtncaattgaagtccatcattgttattatcataaatatgcncccaacaaaaaacaaactaaaanaaaatncnctcaaaagcacacagngggcacattttgtntttgggtagnggaagtgtaggtaatgtcagtgttnggggtttttntttgaatttttaagctgttttaaaaataagttttgttattaggaaaattntttttaaa

SEQ ID NO: 8493 - DNA, 343 bp, Homo sapiens
  unsure (9): n=A,T,C or G
  unsure (10): n=A,T,C or G
  unsure (134): n=A,T,C or G
  unsure (304): n=A,T,C or G
  unsure (323): n=A,T,C or G
  unsure (327): n=A,T,C or G
  unsure (330): n=A,T,C or G
  unsure (336): n=A,T,C or G
ccagcaatnnaaggaggctcgaaagtttcttttataagaatgcctgctagcaagggttccagcaaggtggttggttggtctgtaagtcagtcttgagtacttgaaacagttctgtgtttgttttttttccttancgtttagaatagccatcattgtccggcaataggcagagctatcacgtccaggaaaaatgagggagggaaccacagaggcagcgtgagatccaaatacagcattcaaaggtaattggtccagtggtgcctggggagggaggaagggtgatactccagggttagccgtcttnttttgggggtgtgtaccanccgnttntttcgnggatctg

SEQ ID NO: 8494 - DNA, 550 bp, Homo sapiens
  unsure (9): n=A,T,C or G
  unsure (10): n=A,T,C or G
  unsure (393): n=A,T,C or G
  unsure (402): n=A,T,C or G
  unsure (408): n=A,T,C or G
  unsure (414): n=A,T,C or G
  unsure (423): n=A,T,C or G
  unsure (424): n=A,T,C or G
  unsure (537): n=A,T,C or G
ccacgagannattgtgaacctgctgggggcgtgcacactgtcaggaccaatttacttgatttttgaatactgttgctatggtgatcttctcaactatctaagaagtaaaagagaaaaatttcacaggacttggacagagattttcaaggaacacaatttcagtttttaccccactttccaatcacatccaaattccagcatgcctggttcaagagaagttcagatacacccggactcggatcaaatctcagggcttcatgggaattcatttcactctgaagatgaaattgaatatgaaaaccaaaaaaggctggaagaagaggaggacttgaatgtgcttacatttgaagatcttctttgctttgcatatcaagttgccaaaggaatggaatntctggaatntaagtngtgtgntcacagagnnctggccgccaggaacgtgcttgtcacccacgggaaagtggtgaagatatgtgactttggattggctcgagatatcatgagtgattccaactatgttgtcaggggcaatgcccntctgcctgtaaaa

SEQ ID NO: 8495 - DNA, 574 bp, Homo sapiens
ccttatgaaggacattgtaggagccaatgagaaagaaatagccctaatgaatgctttgactgtaaatttacatcttctaatgttatcattttttaagcctacgccaaaacgatataaaattcttctagaagccaaagccttcccttctgatcattatgctattgagtcacaactacaacttcacggacttaacattgaagaaagtatgcggatgataaagccaagagagggggaagaaaccttaagaatagaggatatccttgaagtaattgagaaggaaggagactcaattgcagtgatcctgttcagtggggtgcatttttacactggacagcactttaatattcctgccatcacaaaagctggacaagcgaagggttgttatgttggctttgatctagcacatgcagttggaaatgttgaactctacttacatgactggggagttgattttgcctgctggtgttcctacaagtatttaaatgcaggagcaggaggaattgctggtgccttcattcatgaaaagcatgcccatacgattaaacctgcattagtgggatggtttggacctgcc

SEQ ID NO: 8496 - DNA, 366 bp, Homo sapiens
  unsure (18): n=A,T,C or G
  unsure (26): n=A,T,C or G
  unsure (43): n=A,T,C or G
  unsure (65): n=A,T,C or G
  unsure (139): n=A,T,C or G
  unsure (148): n=A,T,C or G
  unsure (154): n=A,T,C or G
  unsure (179): n=A,T,C or G
  unsure (196): n=A,T,C or G
  unsure (205): n=A,T,C or G
  unsure (225): n=A,T,C or G
  unsure (228): n=A,T,C or G
  unsure (245): n=A,T,C or G
  unsure (256): n=A,T,C or G
  unsure (259): n=A,T,C or G
  unsure (269): n=A,T,C or G
  unsure (281): n=A,T,C or G
  unsure (316): n=A,T,C or G
  unsure (320): n=A,T,C or G
  unsure (331): n=A,T,C or G
  unsure (345): n=A,T,C or G
  unsure (349): n=A,T,C or G
ctgttcttagaaagcatnccatatanttatccagagcactcangttttggttctcttttacatanctgcattcggagatactctatgtgagacatgtttaaaaaaagagaaacatttatacctggaatttatattcttncaagtaatnttttantcttgttggtaaaggcagtccccanatggcaccggtacattngttaatggngagcctacagagatgctgcnganatggtgctgacgtgtanagcggtttggncanataaaggtgnacagtgccgttncggggggcttctggacctgtccgcttatccttgcncatntgaacatagtngtcgatcagatganccanactgtcaaattgtttaa

SEQ ID NO: 8497 - DNA, 504 bp, Homo sapiens
cgaggtccttcttcactgaagagtatgtcagggaccaccctgaggaccaggacaagctgacccacctcaaggacctgattgcatggcagatccccttcttgggagctgggattaagatccatgagaaaagggtgtcagataacttgcgacccttccatgaccggatggaggaatgtttcaagaacctgaaaatgaaggtggagaaggagtacggtgtccgagagatgcctgactttgacgacaggagagtgggccgtcccaggtctatgctgcgctcatacagacagatgtccatcatctctctggcttccatgaattctgactgcagcacccccagcaagcctacctcagagagctttgacctggaattagcatcacccaagacgccgagagtggagcaggaggaaccgatctccccggggagcaccctgcctgaggtcaagctgcggaggtccaagaagaggacaaagagaagcagcgtagtttttgcggatgagaaagcag

SEQ ID NO: 8498 - DNA, 455 bp, Homo sapiens
  unsure (348): n=A,T,C or G
ccaccaccagctttggctctaactgcagactttgttcttggtgaattgctatagaactgggaatgaggtgtgccctgggcacaggggcactgccccaccaaggtggtgcccactccactgctgggaaaacgaagttacctagcggagcctggagcccactgggtggtcactaatttcagcacaggcagtgcagtgtttgtgctttttttttggagatggagtctcactctgtcacccaggctggagtgcaatggcgtgatctaggctcactgcaacctccgcctcccaggttcgagcaatcctcctgcctcagcctcccaagtagctgggactacaggcacacgccgncacgcctggctagtgtttgctcttaaatacacaaaatgcactgaaccagcaaaaacaaagtcccaggtctgaggagctctgaggatgatgcctgtgatggcctctgg

SEQ ID NO: 8499 - DNA, 544 bp, Homo sapiens
ggacgggcccggtgcggctgtgtgggttcgggagcggagttgcagaatccaaggacccgttttgttctttctccgcactgctttatgggaggcattatggcccccaaagacataatgacaaatactcatgctaaatccatcctcaattcaatgaactccctcaggaagagcaataccctctgtgatgtgacattgagagtagagcagaaagacttccctgcccatcggattgtgctggctgcctgtagtgattacttctgtgccatgttcactagtgagctctcagagaaggggaaaccttatgttgacatccaaggtttgactgcctctaccatggaaattttattggactttgtgtacacagaaacggtacatgtgacagtggagaatgtacaagaactgcttcctgcagcctgtctgcttcagttgaaaggtgtgaaacaagcctgctgtgagttcttagaaagtcagttggacccttctaattgcctgggtattagggattttgctgaaacccacaattgtgttgacctgatgcaaacag

SEQ ID NO: 8500 - DNA, 289 bp, Homo sapiens
  unsure (8): n=A,T,C or G
  unsure (18): n=A,T,C or G
aatcaacntatagtttanttttttctgggtttttgttttgttttgttttctttctaatcgaggtgtgaaaaagttctaggttcagttgaagttctgatgaagaaacacaattgagattttttcagtgataaaatctgcatatttgtatttcaacaatgtagctaaaacttgatgtaaattcctcctttttttccttttttggcttaatgaatatcatttattcagtatgaaatctttatactatatgttccacgtgttaagaataaatgtacattaaatcttggtaaaa

SEQ ID NO: 8501 - DNA, 303 bp, Homo sapiens
ccgggcaggtcaagagtgagccattctccatccctgaggacgacggcaatgacctcactcacaccttcttcaatccagaccgggagggttggctgctcaagctagggggccgcgtgaagacgtggaaacggcgctggttcatcctgaccgacaactgcctctactacttcgagttcaccactgacaaggagccacggggaattatacctcttgagaacctctcggtgcagaaggtggatgaccccaagaagccattctgcctggagctctacaaccctagctgccgaggccagaaaatcaagg

SEQ ID NO: 8502 - DNA, 341 bp, Homo sapiens
ctgcccaagggcgttcgtaacgggaatgccgaagcgtgggaaaaagggagcggtggcggaagacggggatgagctcaggacagagccagaggccaagaagagtaagacggccgcaaagaaaaatgacaaagaggcagcaggagagggcccagccctgtatgaggaccccccagatcagaaaacctcacccagtggcaaacctgccacactcaagatctgctcttggaatgtggatgggcttcgagcctggattaagaagaaaggattagattgggtaaaggaagaagccccagatatactgtgccttcaagagaccaaatgttcagagaacaaactaccag

SEQ ID NO: 8503 - DNA, 514 bp, Homo sapiens
  unsure (10): n=A,T,C or G
  unsure (58): n=A,T,C or G
  unsure (137): n=A,T,C or G
  unsure (177): n=A,T,C or G
  unsure (207): n=A,T,C or G
  unsure (352): n=A,T,C or G
  unsure (357): n=A,T,C or G
  unsure (389): n=A,T,C or G
  unsure (391): n=A,T,C or G
  unsure (393): n=A,T,C or G
  unsure (399): n=A,T,C or G
  unsure (429): n=A,T,C or G
  unsure (491): n=A,T,C or G
gaaatcgaantgttgaatttttggcttgtgagagtttggttccaaaccttaaattcantcaaggtctgtgtctttgttagttacaaaactttaactttattcaaattgatgagctcttgaataattgataatatagnataaatgaaaattaaattctactaaaatctattgaagcangaaaaaaagagcgctatggaccttgactancagagtaatttcccctgttctgttgttcactttctcataaatgttcattagtaggtaaaaattgcaggggatgatataaactgatgcatctgttttgcaataacatatctaatcttctgctccaggagacgttcacagaatttgncagcnaaacctaatacatattcataaccaatatgctntntnaccaanggaaattgaggcaagtacaacagaatgaancatgagaaaccagcatgttaattttaaatttaattatagttataggggaaaaggctgcattntgatagtgtatactcattcagac

SEQ ID NO: 8504 - DNA, 610 bp, Homo sapiens
ctgtcaccaccaagcatgaactttcactgattacccataacctactggaaatcttcagccttgctgtcagcatagaccactgtgagaaacagtacattccattccagtttgccctgctttttgaagatctaaatgccattccatgttttctgttacatattgaagtttcttggttgccaaagaaaaacggattctgctgaacttgtggacagaacaaccccaaggttggaagaaaaaggaaaaataatctatacttgaacatttcaaaagttaaaattttcaacagagttttaacacactgaagcttaaaatacattgacactgaaatgtcaatgggcaaacaccaatttcgccgttcattatgaaatacatcaaacaaaacttgccaaaaatacaaccataaaaatatagcaaatgtatgtatgagcaaactaatgctaaaaatgtctaattttcttggctagtctttcaaggaccagattcatgagtgttatttgaagggaaaaagtgaaatacttggaattattttgagtgatgtgctcctgagcttgttcttaaaatctaccagtggtagcttttggaaagaatgtgtttcataccgatgtgcagg

SEQ ID NO: 8505 - DNA, 285 bp, Homo sapiens
ccacagtgtcaacctgagtggagaaccacgagttctcaccccggtagttgggagtaaggtccagaatgacacggatgctcttttttttagccgattgcaagagactgtcaaaatcttccttggagccaaaattggggtcgatctgcagcaagtcagtctgagcgacatcatccttctggttcttgtgaattggacccagcacaaggcccttcaccttcagagagctcaggtaatcgagacgccccttcagacccgccaggttgcccgcgccgtggccctggaagg

SEQ ID NO: 8506 - DNA, 242 bp, Homo sapiens
  unsure (9): n=A,T,C or G
  unsure (11): n=A,T,C or G
  unsure (36): n=A,T,C or G
  unsure (107): n=A,T,C or G
  unsure (133): n=A,T,C or G
  unsure (161): n=A,T,C or G
  unsure (181): n=A,T,C or G
  unsure (187): n=A,T,C or G
  unsure (197): n=A,T,C or G
  unsure (222): n=A,T,C or G
  unsure (230): n=A,T,C or G
  unsure (237): n=A,T,C or G
actgacgancnggtcacataatcaggagccagactnctgagttgtaactgggcccccaactttccgtgtgattattaaaagagcccttcttcttttctaaaacttantgccaaatgctgaggagcataatgtnggtgagaattttttttttttgggggggngaaaattaagctagagcttnttgaantacctagttnccaggggctttttattgtatttttncttatggncctagantgaca

SEQ ID NO: 8507 - DNA, 554 bp, Homo sapiens
  unsure (501): n=A,T,C or G
tttttttttatcgttaacaaaagaaaaaaatgtctttataagtacataccttttgtcgtcaaaaaaaatatagaaacacaatgtattcaaaaaaaatcaaaattatacagccatgtttatgaagtctacatttcccttgtcttggatatatatatatggagatatatatacaattcaagcagttttaattaagggtaatcattgggtttttctgaaaccggaaaagtcacgagtctctctcttttttcactttcacatctccagcaaggatggttgcaatttccccttgcataaaggcccaggggacattggagcccacaagagggcatttttccccactgggacaatagacctctccactagctccctgctgtttgatgctttgtctggagcaagggaagcagaacttgtgcgaagggacggacgggcactgcacaaaatgggtgtcctccagccgctcgtggcagagggtgcagcacagcggggcactggttgccaganaggagtccgggaggctggcagggtgcactggctccagtcctcctgtgttgcct

SEQ ID NO: 8508 - DNA, 449 bp, Homo sapiens
ctggagagtgtagatcccaaaaattacccaaagaagaagatggaaaagcgatttgtcttcaacaagatagaaatcaataacaagctggaatttgagtctgcccagttccctaactggtacatcagcacctctcaagcagaaaacatgcccgtcttcctgggagggaccaaaggcggccaggatataactgacttcaccatgcaatttgtgtcttcctaaagagagctgtacccagagagtcctgtgctgaatgtggactcaatccctagggctggcagaaagggaacagaaaggtttttgagtacggctatagcctggactttcctgttgtctacaccaatgcccaactgcctgccttagggtagtgctaagaggatctcctgtccatcagccaggacagtcagctctctcctttcagggccaatccccagcccttttgttgagccagg

SEQ ID NO: 8509 - DNA, 391 bp, Homo sapiens
cctaagacccaacagatgtaggatccagatctggattcgtgccagccccaccaatggtctgtcaggccaagaaggtgctttctttggtaattcatgttttttaacttcctggagaagagatcttttcccacaagccatcttcattttttttgtagagtagggctttatttccaggaaacagtgtgttagctggagatgggtgtttttttaaaaacatcaaggtagatctaatatgttcaacaaagtggggtggctcagccagaggcgaagtggaaagattctctagtatttgcttgtcatcttggtgcaaccagaaatccacatgtggaaatggtgtccaggagtacggtcctatacgaagttgttctgtctctgcatcataaatgctaat

SEQ ID NO: 8510 - DNA, 335 bp, Homo sapiens
  unsure (8): n=A,T,C or G
  unsure (10): n=A,T,C or G
  unsure (17): n=A,T,C or G
ctgtggcngnctgtcanagaagcacatttttctgcagataattagaatggcttcccccatctctcacggactgtcccaagtctagaaaagaattgagttcctcttctattagtcaaataaaagggaagagaatgtttgtcttcctttcctttctgtagtgttaagaaaataaacgaacttaatgattctaaattatcagtgagcttaacactgtactatagaccaaagattaccttttcaaaaagtcctttgaggtgaaatattttgtatacgtaatacatagatgcacatataaacacacacatatagaatctcaatattttaacacttctttg

SEQ ID NO: 8511 - DNA, 604 bp, Homo sapiens
ccactcattctactgcttagctcacagtgtttctgcagcggtatgtctcaccacttgttctgttgttccccttacacactccagtatgtatctctgccatcaaactgtccacgtgtgagctgaacctgctatttgttcattaacttactgttttataccatttgagcaggaagttgtagtcattctctggctttgtagtttgctttattgctcataagtaataactggaaaaaggagttttaaaacactcattattttcaaacattttgactaatatttattctgaaatgtcagggtaatttggtaaaatatcaaaatgctaaaactgaagacttatttttttctttaccagaaagtaataattacatatatttataactgcagagtccaatacaatgaattaatatttcttccaaatgttcttacttaacatctttctagctttagcaaagcagtatcttactttcacattaaaaaaaagaaacccttcataatagtgtaaggcagtttgtggaaaacttattaccgtcattttacactttactaaattcaggctaaaccatcatcaaattaaccagaattaagattagggctcaagtcttct

SEQ ID NO: 8512 - DNA, 529 bp, Homo sapiens
  unsure (2): n=A,T,C or G
  unsure (222): n=A,T,C or G
  unsure (256): n=A,T,C or G
  unsure (282): n=A,T,C or G
  unsure (283): n=A,T,C or G
  unsure (323): n=A,T,C or G
  unsure (368): n=A,T,C or G
  unsure (429): n=A,T,C or G
  unsure (473): n=A,T,C or G
  unsure (485): n=A,T,C or G
gnaaatattccaaaattaactgtggtgacagatgcacttacctgtgactacactaaaagccactgaattgtacacataaaatgggtgaattttaagatatgtgaattatatctcaataatgttatttttaataatgctgttattaagattttgattgggattaaattgggatctatagatttggagaaaacatgtatgtttataatattgattctttcaatncatgaacattatataatgctccaattatttgggncttctttagtttctctcaataatgtnntatagaattccatgcagaagtactgtacatattttattanagtcattcctcgatatttactattactgatgctatttatatggtntattttaaagaagacaaagcattgaatttttttattgtggggaagaacagagcatggtgtncatattaaataatcaaaatttcaaaataaatcactatacatggnctaacatgattntttctgattttaaattttatttacagaaaagtcatacaaatata

SEQ ID NO: 8513 - DNA, 592 bp, Homo sapiens
  unsure (573): n=A,T,C or G
caaagatattccagccagggtaaccctgatgcagctccctaccaggcaagagatccgagtgaggaacctgttcaatgtggtggactgcaagctccattggcagaagaacggagactacttgtgtgtgaaagtagataggactccgaaaggcacccagggtgttgtcacaaattttgaaattttccgaatgagggagaaacaggtacctgtggatgtggtcgagatgaaagaaaccatcatagcctttgcctgggaaccaaatggaagtaagtttgctgtgctgcacggagaggctccgcggatatctgtgtctttctaccacgtcaaaaacaacgggaagattgaactcatcaagatgttcgacaagcagcaggcgaacaccatcttctggagcccccaaggacagttcgtggtgttggcgggcctgaggagtatgaacggtgccttagcgtttgtggacacttcggactgcacggtcatgaacatcgcagagcactacatggcttccgacgtcgaatgggatcctactgggcgctacgtcgtcacctctgtgtcctggtggagccataaggnggacaacgcgacctcggcc

SEQ ID NO: 8514 - DNA, 591 bp, Homo sapiens
tgatcagcccctaaaggtaatgccagcccctccaccaaaggagaatgcttgggtgaagcgaagttctaaccctcctgctcgatctcagagctcagacacagagcagcagtcccctacaagtggtgggggaaaagtagctccagctcaaccatctgaggaaggaccaggaaggaaagatgaaaataaagtagatgggatgaatgccccaaaaggccaaactgggaactctagccgtggtccaggagacggagggaacagagaccactggaaggagtcagataggaaagatggcaaaaaggatcaagactccagatctgcacctgagccaaagaaacctgaggaaaatccagcttctaagttcagttctgcaagcaagtatgctgctctctctgttgatggtgaagatgaaaatgagggagaagattatgccgaatagacctctacatcctgtgcttttctcctagtttctctccaccctggaacattcgagagcaaatcaaaacctctatccagacaagacaaaataaaactcaacatctcctgaagacctttcttacctttttttaaaaacaaaaaatgaaattattttgc

SEQ ID NO: 8515 - DNA, 476 bp, Homo sapiens
  unsure (16): n=A,T,C or G
  unsure (40): n=A,T,C or G
  unsure (53): n=A,T,C or G
  unsure (108): n=A,T,C or G
  unsure (132): n=A,T,C or G
  unsure (139): n=A,T,C or G
  unsure (140): n=A,T,C or G
  unsure (145): n=A,T,C or G
  unsure (185): n=A,T,C or G
  unsure (206): n=A,T,C or G
  unsure (265): n=A,T,C or G
  unsure (395): n=A,T,C or G
  unsure (399): n=A,T,C or G
  unsure (421): n=A,T,C or G
  unsure (461): n=A,T,C or G
tgctgcctcacatcancatgttgtcaggatcttgcatcantattgagcaccanccattccctgaccagactctatgtgggggagaatgccttgggagactcaggagtngcaattttatgtgaaaaagccaanaatccanngtgtnacctgcagaaactggggttggtgaattctggccttacgtnagtctgttgttcagctttgtnctcggtactcagcactaatcagaatctcacgcacctttacctgcgaggcaacactctcngagacaaggggatcaaactactctgtgagggactcttgcaccccgactgcaagcttcaggtgttggaattagacaactgcaaccttacgtcacactgctgctgggatctttccacacttctgacctccanccanagcctgcgaaagctgagcctgngcaacaatgacctgggcgacctggggtcatgatgttctgngaagtgctgaaacag

SEQ ID NO: 8516 - DNA, 616 bp, Homo sapiens
  unsure (10): n=A,T,C or G
ctcaaatgcngtcggcttgtcctggctcttgccctcatcctggttctggaatcctcagttcaaggttatcctacgcagagagccaggtaccaatgggtgcgctgcaatccagacagtaattctgcaaactgccttgaagaaaaaggaccaatgttcgaactacttccaggtgaatccaacaagatcccccgtctgaggactgacctttttccaaagacgagaatccaggacttgaatcgtatcttcccactttctgaggactactctggatcaggcttcggctccggctccggctctggatcaggatctgggagtggcttcctaacggaaatggaacaggattaccaactagtagacgaaagtgatgctttccatgacaaccttaggtctcttgacaggaatctgccctcagacagccaggacttgggtcaacatggattagaagaggattttatgttataaaagaggattttcccaccttgacaccaggcaatgtagttagcatattttatgtaccatggttatatgattaatcttgggacaaagaattttatagaaatttttaaacatctgaaaaagaagcttaagttttatcatccttttttttctcatgaat

SEQ ID NO: 8517 - DNA, 294 bp, Homo sapiens
  unsure (28): n=A,T,C or G
  unsure (33): n=A,T,C or G
  unsure (46): n=A,T,C or G
  unsure (112): n=A,T,C or G
  unsure (138): n=A,T,C or G
  unsure (140): n=A,T,C or G
  unsure (194): n=A,T,C or G
  unsure (201): n=A,T,C or G
  unsure (224): n=A,T,C or G
  unsure (233): n=A,T,C or G
acgtgaaaatgctacagttatggataanacccnagctttgattgantccgttattccgaaaggggcacaggcatgccaaatttgcatcacatacatttgtgaagaagacagntacctggcagagacgctgggactctnancagctcttcaggcagtgcaggacaacccagctatgcccacatgctcaagcccanaaggcanaatcaagctttgctttctagaanacgctcaanggatatggaaacaaaagttgcagaggtgccatgttcagaatacaataataaagtggagcga

SEQ ID NO: 8518 - DNA, 580 bp, Homo sapiens
  unsure (8): n=A,T,C or G
  unsure (9): n=A,T,C or G
  unsure (11): n=A,T,C or G
  unsure (18): n=A,T,C or G
  unsure (19): n=A,T,C or G
  unsure (119): n=A,T,C or G
ctggtttnnanttctaanngtataaaaattggaaatttgaaatagttctgtaaaagaaaaaaatgtaaaaatacatctgctttctctcatggtttaatacagcattggaaggctttcanatgttttcttaaaaaaaaacaaaacccaaaaaaactcaacatttaaaaccaaatctcagcttcatttccagaaatattgcagtttggtttaggtaatgtttcatttaatctactccagtttccacaaaatggcattttattaaaaaaacctttcagttatttggtccttttgcaatttgctgtgcacataatgcctactgtaccaaacttttattgcctttaaatttagttgtaattttattgataaaatttaaatctagtgtctttatttcttctgttacaatagtgttgcttgtgtaagcaggttagagtgcacagtgtccccaattgttcctggcactgcaaaaccaaattaaacaattccacaaagaattctgacatcaatgtgttttcctcagtcaggtctatttcaagattctagaagttccttttgtaaaacttgcctttaaaactcttcctcc

SEQ ID NO: 8519 - DNA, 332 bp, Homo sapiens
ctgccacaaaccaggtgaagctttgttctaagaatatttgtttcatctagtttatgagtccaaatgatatagactgtaaatgtcacagcagtggtgaaagactgctcggtcatgagcaccgacagtaactcactggcacgtgaatttctgaccgatgtcaaccggctttgcaatgcagtggtccagagggtggaggccagggaggaagaagaggaggagacgcacatggcaacccttggacagtaccttgtccatggtcgaggatttctattacttaccaagctaaattctataattgatcagtagagatggggtttcaccgtgttgaccag

SEQ ID NO: 8520 - DNA, 587 bp, Homo sapiens
  unsure (574): n=A,T,C or G
cctaaggctgatgaggaagaggaagtgtcagatgaagtcgatggggcagaggtccctaaccccgactcagtcacagatgacctcaaggtcagtgaaaagtcagaagcagcagtgaagctgaggaacacagaagcatcttcagaagaagagtcatctgctagcaggatgcaggtggagcagaatttatcagatcatatcaaactctcaggtgagaagatggttgattaggtttcacatataagtagtaggtggttgatgatcagatgtcttaaatggatgttcactatgacaagtatctgactagtccacatagcttaatcagtaatctaccaaagtcatgggtaactcaaccaatagtcccagggaatattgtaaaagtcaggagcctcactgctatgtgtagcagaattgtgagacaagcagccagcagtgcctatttggtttaataaaaaagaagattctaaaatgagtttttttttttcgtgcaactcaatttacaatatacgtttttggaaggcttcttttgaattcacatgagtagagaaaaccaattatagataattctttgtagatncttagctttcgac

SEQ ID NO: 8521 - DNA, 647 bp, Homo sapiens
  unsure (561): n=A,T,C or G
ccatcatctccaactctttaccccaacctggcaccttgtagggggctagaagggtgaggggaggtgtctttcacttatgcttaggtcactcttagaggactatcctcaaacttgaggtgacagggaactcttcacgggggcaggatttgatgttttgtttttagccatgtttgtcaatgacaatgtcaatttctagttccaatttgtacccttgtctcatttctacattaaaaacaaaaaacaatcatctgtcataaaagttcagagtaagctgggtgtggtggcacatgactttagtcccagctacttggggggctgaggcaggagggtcgcttgagcccaggaaagttcgagtccaagctgggcaacagagcaaaaccttgtctcttaaaaaagaaaaaaaatagagttcagaatagataaaagagttgttattctaagaaaatagactactgaaggagaaaggctttaataatattaaaaataggcaaggtaatgcttttcatagtatagtaagatttgcctaataccatcttatttctttgattaaaagttacttancttcagcatgcgtgtacattcaaaatacaaaattaaagcatgagttgtcattaatttgcagaattctatgattgaagcctctaaat

SEQ ID NO: 8522 - DNA, 474 bp, Homo sapiens
ccatataatacttgcacattatgcaaaaaaaaatgttgatagtatctccttgccacacaatatgcagagttgacaacctttgaaaaccaaggtaactaatatgtttgtcctagttgtgtggcgcttggtaacaaagtctgtacatattatgtataaaatgtgtattggttagcatttagtactaagaaattctgagtttaaaataagtgatttttttcaaagtagcgatatctatatctgtgtttatctaaaaatactggcttgaatagaaaacattctcagatgattcaagattgagtaaaaatgagaatcccatacattccattattaaattctgccctattcccaattgttagcatctggctgatattaaggtctttgattgtcacaatattctcaataaatgagacattctgaactgcctggtgatattttcaaaaagagcaattaaaatgtgtattccctctaatacag

SEQ ID NO: 8523 - DNA, 568 bp, Homo sapiens
  unsure (9): n=A,T,C or G
agctagacnaagttggtcatgatgcagaagctactcaaatgcagtcggcttgtcctggctcttgccctcatcctggttctggaatcctcagttcaaggttatcctacgcagagagccaggtaccaatgggtgcgctgcaatccagacagtaattctgcaaactgccttgaagaaaaaggaccaatgttcgaactacttccaggtgaatccaacaagatcccccgtctgaggactgacctttttccaaagacgagaatccaggacttgaatcgtatcttcccactttctgaggactactctggatcaggcttcggctccggctccggctctggatcaggatctgggagtggcttcctaacggaaatggaacaggattaccaactagtagacgaaagtgatgctttccatgacaaccttaggtctcttgacaggaatctgccctcagacagccaggacttgggtcaacatggattagaagaggattttatgttataaaagaggattttcccaccttgacaccaggcaatgtagttagcatattttatgtaccatggttatatgattaatc

SEQ ID NO: 8524 - DNA, 591 bp, Homo sapiens
  unsure (8): n=A,T,C or G
  unsure (16): n=A,T,C or G
  unsure (446): n=A,T,C or G
gttcaatnaagacagngtggctaggaaatccctggaaggactcccaccactaagacttgtcaaaaattcttcaaacagtacttgcagaggccctgaaatttctgggacttctataaaatccctccctgggcttgaaaaaataattttgaatttgggcagtctagagccttagagagctaagagctgatagtagctctatcagagtaaactcaaaaacaaacacacggggggtctctagggctctctggctggtggcttcatgggtacataagcctgtctttccaccaaggaatctggcttgggatgcttattcatatttgaatcacgaaagcccaccatttaaataatatttggtaaagatcttttaggttaattagatcttacatatacttttgcaaaagctacctctggatcatttctagtattactagcatttcagatattgnttataactatcacccttgtagatattacactaaattaaaacaatagtgatacaaattcccaccttaccaaaatagcaataatccaatttatttcctagtttatttaatcagattctcctaccaaccatctcctcttctatttttt

SEQ ID NO: 8525 - DNA, 581 bp, Homo sapiens
  unsure (10): n=A,T,C or G
  unsure (41): n=A,T,C or G
  unsure (269): n=A,T,C or G
  unsure (490): n=A,T,C or G
cctgaatttnaaccttcactggaggttttactatgatcctnctgagttccagaccattattattggagataataaaactcagtaccacatggggtatttcagggattctcctgatgaatttcctgtatatgttggtataaatgaagcaaagaaaaattgtataattgttccaaatggagataatgtatttgctgcagtcaaattatttttgacgaaaaaacttaaagaaataacggataaaaagaaaatcaatctcttgaaaaacatanatgaaaaactcacagaagcagccagagaattggggtactcgcttgaacagagaaccgtgaagatgaaacagagagataagaaagttgtgacaaagacctttcatggtgcaggcttggttgttccagtagataaaaatgatgttgggtaccgagagctccctgaaacagatgctgacctcaagagaatttgcaagacaatagttgaggctgcaagtgatgangagagactaaaagcttttgctcccattcaggaaatgatgacttttgtgcagtttgctaatgatgaatgtgattatggcatggggcttgaat

SEQ ID NO: 8526 - DNA, 549 bp, Homo sapiens
  unsure (8): n=A,T,C or G
  unsure (10): n=A,T,C or G
  unsure (482): n=A,T,C or G
ctagactnanttggtcatgatgcagaagctactcaaatgcagtcggcttgtcctggctcttgccctcatcctggttctggaatcctcagttcaaggttatcctacgcagagagccaggtaccaatgggtgcgctgcaatccagacagtaattctgcaaactgccttgaagaaaaaggaccaatgttcgaactacttccaggtgaatccaacaagatcccccgtctgaggactgacctttttccaaagacgagaatccaggacttgaatcgtatcttcccactttctgaggactactctggatcaggcttcggctccggctccggctctggatcaggatctgggagtggcttcctaacggaaatggaacaggattaccaactagtagacgaaagtgatgctttccatgacaaccttaggtctcttgacaggaatctgccctcagacagccaggacttgggtcaacatggattagaagaggatnttatgttataaaagaggattttcccaccttgacaccaggcaatgtagttagcatattttatgtacca

SEQ ID NO: 8527 - DNA, 542 bp, Homo sapiens
ccactgcactgaaaaaattgaaaagtcttggtttaattcatgctgatctcaagccagagaatattatgttggtggatcctgttcggcagccttacagggttaaagtaatagactttgggtcggccagtcatgtatcaaagactgtttgttcaacatatctacaatctcggtactacagagctccagagattatattggggttgccattttgtgaagccatagacatgtggtcattgggatgtgtgattgcagaattatttcttggatggccgctctacccaggagccttggagtatgatcagattcgatacatttctcagactcaaggtttgccaggagaacagttgttaaatgtgggtactaaatccacaagatttttttgcaaagaaacagatatgtctcattctggttggagattaaagacattggaagagcatgaggcagagacaggaatgaagtctaaagaagccagaaaatacattttcaacagtctggatgatgtagcgcatgtgaacacagtgatggatttggaaggaagtgat

SEQ ID NO: 8528 - DNA, 505 bp, Homo sapiens
  unsure (8): n=A,T,C or G
  unsure (19): n=A,T,C or G
  unsure (35): n=A,T,C or G
  unsure (67): n=A,T,C or G
  unsure (179): n=A,T,C or G
  unsure (229): n=A,T,C or G
  unsure (338): n=A,T,C or G
  unsure (380): n=A,T,C or G
  unsure (397): n=A,T,C or G
  unsure (404): n=A,T,C or G
  unsure (417): n=A,T,C or G
  unsure (439): n=A,T,C or G
  unsure (498): n=A,T,C or G
ttctaatngtataaaaatnggaaatttgaaatagntctgtaaaagaaaaaaatgtaaaaatacatcngctttctctcatggtttaatacagcattggaaggctttcagatgttttcttaaaaaaaaacaaaacccaaaaaaactcaacatttaaaaccaaatctcagcttcatttccanaaatattgcagtttggtttaggtaatgtttcatttaatctactccagttnccacaaaatggcattttattaaaaaaacctttcagttatttggtccttttgcaatttgctgtgcacataatgcctactgtaccaaacttttattgcctttaaatttagntgtaattttattgataaaatttaaatctagtgtctttatttnttctgttacaatagtgntgcttgngtaagcaggttanagtgcacagtgtccccaattgntcctggcactgcaaaaccaaattaaacaattccacaaagaattctgacatcaatgtgtntttcctc

SEQ ID NO: 8529 - DNA, 402 bp, Homo sapiens
  unsure (135): n=A,T,C or G
  unsure (142): n=A,T,C or G
  unsure (198): n=A,T,C or G
  unsure (351): n=A,T,C or G
  unsure (381): n=A,T,C or G
tacttctagagttatatagtcccagagatgtttatgactatttacgtcccattgctctgaatctgtgtgcagacaaagtttcttctgttcgttggatttcctacaagttggtcagcgagatggtgaagaagctgnacgcggnaacaccaccaacgttcggagtggacctcatcaatgagcttgtggagaactttggcngatgtcccaagtggtctggtcggcaagcctttgtctttgtctgccagactgtcattgaggatgactgccttcccatggaccagtttgctgtgcatctcatgccgcatctgctaaccttagcaaatgacagggttcctaacgtgcgagtgctgnttgcaaagacattaagacaaactctactanaaaaagactgtttcttggcct

SEQ ID NO: 8530 - DNA, 591 bp, Homo sapiens
ccaaaaaaatcaagatttaatttttttatttgtactgaaaaactaatcataactgttaattctcagccatctttgaagcttgaaagaagagtctttggtattttgtaaacgttagcagactttcctgccagtgtcagaaaatcctatttatgaatcctgtcggtattccttggtatctgaaaaaaataccaaatagtaccatacatgagttatttctaagtttgaaaagtaaaaagaaattgcatcacactaattacaaaatacaagttctggaaaaaatatttttcttcattttaaaacttttttaactaataatggctttgaaagaagaggcttaatttgggggtggtaactaaaatcaaaagaaatgattgacttgagggtctctgtttggtaagaatacatcattagcttaaataagcagcagaaggttagttttaattatgtagcttctgttaatattaagtgttttttgtctgttttacctcaatttgaacagataagtttgcctgcatgctggacatgcctcagaaccatgaatagcccgtactagatcttgggaacatggatcttagagtcactttggaataa

SEQ ID NO: 8531 - DNA, 555 bp, Homo sapiens
  unsure (11): n=A,T,C or G
  unsure (49): n=A,T,C or G
  unsure (311): n=A,T,C or G
  unsure (437): n=A,T,C or G
  unsure (502): n=A,T,C or G
  unsure (514): n=A,T,C or G
gctcacctgcnccaccccaggagaaactgcagacctatcagccagaggntgttaaggcaaatcaagcggaaagtatgtcttcttaagctaccatttacatgttttcatatttgcatttatcatttgcttctaattatctgtctagaccatagtaagaattaacttgttttgtttgttttagggtaatcttacatgagccttctttagaaacagcaatcgattcttttttattttttaatgatacagaaaattgtttatattaattttgtttgcttacttctgcatttatattttgttccactagtcctcanacttcttcagtgaataattttttttttctccaaaattaagataagttctttgtttggagctatgtaccacatcctttcaggtgttcttctgaattatatttaatctttgataatgagtgaaaagcncagacattcctggagtaagacatctatgtgttctctcctagatgatcctaccagacaatatgaangaccattacatnactatcgaccacagcaggaatcaccatctccccaacaacag

SEQ ID NO: 8532 - DNA, 595 bp, Homo sapiens; identical to SEQ ID NO: 8184

SEQ ID NO: 8533 - DNA, 591 bp, Homo sapiens
  unsure (18): n=A,T,C or G
  unsure (19): n=A,T,C or G
  unsure (553): n=A,T,C or G
ctgacacaggcaaacagnngcacaagtggaatagaatacaatgcctgattctcacttgttgtctccaaccaagccaacatggagcacatgatgaagtcccactcactctctgccaaaggggatgagcagtatttcagaaatagggaaagaaaccggattatttctatatttacacccagtacctctggacttgcttctgatagattacaactgaaaagaaaaatatcttcatgctctttcttccaggatattatgatttttaatattccatgtaatagctctccatcatctatacttttggtttgcagacaagaattgaaaatggcaagatgtccaaaacctccattagtgctgcaaagatctttcttagtccagcccaaaagagcaggtatacattgagcactaaattctttcttttcttcttttgacaaaaatggacatagactttgaatggtatgcaaattgccttcagttagtggaaaaaaactttcttttctcttataatgtggttttacttcatcagatgaaatgcttcgggaaaggatcaacttancaataataagagaccacagtgtgccatgttctctggac

SEQ ID NO: 8534 - DNA, 485 bp, Homo sapiens
  unsure (8): n=A,T,C or G
  unsure (11): n=A,T,C or G
  unsure (65): n=A,T,C or G
  unsure (308): n=A,T,C or G
  unsure (463): n=A,T,C or G
  unsure (475): n=A,T,C or G
ggaatccncanttcaaggttatcctacgcagagagccaggtaccaatgggtgcgctgcaatccanacagtaattctgcaaactgccttgaagaaaaaggaccaatgttcgaactacttccaggtgaatccaacaagatcccccgtctgaggactgacctttttccaaagacgagaatccaggacttgaatcgtatcttcccactttctgaggactactctggatcaggcttcggctccggctccggctctggatcaggatctgggagtggcttcctaacggaaatggaacaggattaccaactagtanacgaaagtgatgctttccatgacaaccttaggtctcttgacaggaatctgccctcagacagccaggacttgggtcaacatggattagaagaggattttatgttataaaagaggattttcccaccttgacaccaggcaatgtagttagcatatttnatgtaccatggntatatgatta

SEQ ID NO: 8535 - DNA, 361 bp, Homo sapiens
cctgtggaaaagggaagtggacaacatttatattacaagacagtaattttattgaaacatctttttttgtctaaaactatgcatggagatattaatctcttgtttataaattaggttaagtctaacatcactatttgaaaccagtgttatttacaaaaatgaacctcttctttgctttattgttggtttacaggaataattttaaaccaacctcaatctatctttaaaaatcttcctgccttcaaatgcccagcaacccttataaggtagggggcagccctttgacagcaacattcatcattcaccaggaatgtagaaccacaagtgaacaacaacaacaacaacaacaagattaaatcat

SEQ ID NO: 8536 - DNA, 582 bp, Homo sapiens
ctgttggtcagtatgccaataacatcacactttggatctttgcagtcactgcaggcatgttcctctatgtagccttggtggatatgcttccagaaatgttgcatggtgatggtgacaatgaagaacatggcttttgtcctgtggggcaattcatccttcagaatttaggattgctctttggatttgccattatgctggtgattgccctctatgaagataaaattgtgtttgacatccagttttgacctttcccagtaatcactgttgattacgagaatgttaccatgcagctttgcatctgttccttgtactgtatgcacattgctcaaaggaaagtcagtggcttgcactacttacaagtttcatagatttgagcctaaccacaagaggctggtgcttagtactgttttccctgcacgtaggggtcttttaaaaatataaagcttgtgataaagagaggagaatatgggactccatgaaccagtgttgatatgtttgattaagacttttcacaaaataatcatataaaacactagtctctttattagtagaaacttctgtggctatgcagaaatagagatc

SEQ ID NO: 8537 - DNA, 310 bp, Homo sapiens
  unsure (9): n=A,T,C or G
  unsure (10): n=A,T,C or G
  unsure (136): n=A,T,C or G
  unsure (262): n=A,T,C or G
  unsure (285): n=A,T,C or G
caagctttnnttttttttttttttttttttttttaggagccaaaatagttatttattaataatttaaggttttacattcttataataaatttcagctctaaactttacaccacgaacataatggagaatttaactntcccttcttcacaatcaaatgcatttctcttatcaaatgggtacccatgctcacacacacacacttccagttttatacaaatttttttaaaggaaagaaaccaacccaaagtattgcatttgaggngacactccctgaaaaattttatncagaggtaatatactgtttagcaca

SEQ ID NO: 8538 - DNA, 602 bp, Homo sapiens
  unsure (540): n=A,T,C or G
cctcttgaaacctaggcttggaactggcatacagtcacttcttccacattctattgatcaaatcaagtcacagtgccagcccagattcaaatggtggggaaagagacttcatttatggaagggaggagctgcaaatttcattgccaagaggtgtggatacccagaaagatacatttgacaaaccatctatcaaagttactgtcagaggtatgtttttggaaatatcatttggagtgggatgtgtcctgtatgactggaatcgttttctatttgtaacagagaagcgtgcccactccttgcacccatagataacccaatgccgaaggatatgagagagagagatgtccagtttgtgcctctcccagcttcttgtccagagactccttggtttagattttgatacactacttagaaaaggtggagagtttctttaagatttcatccacagagggccgcacagagggatcatgggcccggcactcatcaatgatctcccgcagctctgaagggcagtcttcacccagtggctcctgctgccgnttcacagccaccagcttgcggatcttctcagaattacagccttgaaacgggatatctccagt

SEQ ID NO: 8539 - DNA, 575 bp, Homo sapiens
  unsure (562): n=A,T,C or G
ctggtgggagggatgaaggaaattatctggacgatgctctcgtgagacaggatgcccaggacctgtatgaggctggagagaagaaatgggggacagatgaggtgaaatttctaactgttctctgttcccggaaccgaaatcacctgttgcatgtgtttgatgaatacaaaaggatatcacagaaggatattgaacagagtattaaatctgaaacatctggtagctttgaagatgctctgctggctatagtaaagtgcatgaggaacaaatctgcatattttgctgaaaagctctataaatcgatgaagggcttgggcaccgatgataacaccctcatcagagtgatggtttctcgagcagaaattgacatgttggatatccgggcacacttcaagagactctatggaaagtctctgtactcgttcatcaagggtgacacatctggagactacaggaaagtactgcttgttctctgtggaggagatgattaaaataaaaatcccagaaggacaggaggattctcaacactttgaatttttttaacttcatttttctacactgntattatcattatc

SEQ ID NO: 8540 - DNA, 468 bp, Homo sapiens
ccttgttccactgtgccttggtttctcctttatttctaagtggaaaaagtattagccaccatcttacctcacagtgatgttgtgaggacatgtggaagcactttaagttttttcatcataacataaattattttcaagtgtaacttattaacctatttattatttatgtatttatttaagcatcaaatatttgtgcaagaatttggaaaaatagaagatgaatcattgattgaatagttataaagatgttatagtaaatttattttattttagatattaaatgatgttttattagataaatttcaatcagggtttttagattaaacaaacaaacaattgggtacccagttaaattttcatttcagataaacaacaaataattttttagtataagtacattattgtttatctgaaattttaattgaactaacaatcctagtttgatactcccagtcttgtcattgccag

SEQ ID NO: 8541 - DNA, 638 bp, Homo sapiens
  unsure (10): n=A,T,C or G
  unsure (517): n=A,T,C or G
  unsure (536): n=A,T,C or G
  unsure (551): n=A,T,C or G
  unsure (599): n=A,T,C or G
ccaacatggngaaaccccatgtttactaaaaatacaaaaattagccaggcatggtggtgcatgcctgtaatcccagctactggggatctgaggcaggaggatcgcttgaacccaggaggcagaggttgcagtgagctgagatcatgccactgaactccagcctgggcaacagagagactccgtctcaaaaaaaaaaaaaaaaaaattcatcaaggtatatacatatacattcagattagtgtacatgtaaaatatgatatacaacagagcctttcatgaataggataatttgcatattcatatggaaaacatatgcagtatcttaagccatagttttccaaaatttcaaattaaatacttatagctttgacatattcctgttacttcaactttccagggatgctctagaagaaacgggagacatgttgtaagactttaatgacattccacaaactaaatttattgtgggaattaacatcagaaattaagggaaaaaatactctaatttgatcactanctgctacaagactccctanaaagtggaccatgtntatttttttcacaattctgtttgctaagtggaaaagctgcttcttggnagactcaaacatgacacatactgaaatggcaagcaatga

SEQ ID NO: 8542 - DNA, 533 bp, Homo sapiens
  unsure (487): n=A,T,C or G
  unsure (494): n=A,T,C or G
  unsure (522): n=A,T,C or G
  unsure (523): n=A,T,C or G
cctgaaaagtggttctggaaaagtgtaccaaggccctgcaaaaggtgctgctgatacaacaatcatactttcagatgaagatttcatggaggtggtcctgggcaagcttgaccctcagaaggcattctttagtggcaggctgaaggccagagggaacatcatgctgagccagaaacttcagatgattcttaaagactacgccaagctctgaagggcacactacactattaataaaaatggaatcattaaatactctcttcacccaaatatgcttgattattctgcaaaagtgattagaactaagatgcaggggaaattgcttaacattttcagatatcagataactgcagattttcattttctactaatttttcatgtatcattatttttacaaggaactatatataagctagcacataattatccttctgttcttagatctgtatcttcataataaaaaaattttgcccaagtcctgtttccttanaatttgngatagcattgataagttgaaaggaaaannaaatcaataa

SEQ ID NO: 8543 - DNA, 591 bp, Homo sapiens
  unsure (9): n=A,T,C or G
  unsure (10): n=A,T,C or G
  unsure (564): n=A,T,C or G
ctcctatgnnataagaggaaagtttatcctctatactattcagatgtaaggaatgatatattgcttaattttaaacaatcaagactttactggtgaggttaagttaaattattactgatacatttttccaggtaaccaggaaagagctagtatgaggaaatgaagtaatagatgtgagatccagaccgaaagtcacttaattcagcttgcgaatgtgctttctaaattataaagcacttgtaaatgaaaaatttgatgctttctgtatgaataaaactttctgtaagctaggtattgtctctacaaaattctcattgtatagttaaaccacagtgagaagggttctataagtagttatacaaaccaagggtttaaatacctgttaaatagatcaattttgattgcctactatgtgaactcactgttaaaggcactgaaaatttatcatatttcatttagccacagccaaaaataaggcaatacctatgttagcattttgtgaactctaaggcaccatataaatgtaactgttgattttctcacttggtgctgggtactaggttnataaaattgtatgatagttattatatt

SEQ ID NO: 8544 - DNA, 518 bp, Homo sapiens
ccagctgtgaaactgatgaaaaagtttcttccgaataatctacattaacttgagagatattgaggtatgtttcttgattatcttctcccacaaatggcgatgtgtgagttaacaacatatatgctattataccaatattccacatatctgttgctgtggtaatgggatcatagttcaggatttctggagctaaatattctggtgttcccataatttcccgaagttcacacgcatgccctatttttcgagacattccaaaatctactattttaatgtccccgagagggtatatgctgctcagtaatatattctgtggctttaaatcaaggtgtacaatgttattctgatgtagataataaactccttcaagtatttgtttaatgagtctgataacatcattttcagaaaccatttcagccaactcaggtaaacacaggctgaaaatttctccacctgcagcactaaaataaaattcaaagaacagagacttgaaaattcattcacttaaacacttttaa

SEQ ID NO: 8545 - DNA, 597 bp, Homo sapiens
ctgactatatctcagggtagcttccttgtttctactcagaagctagttgggccacaactgtcacgacattctgcagagattcccaacctgggattccagaagatctctggacaggtcccttcagtaggcaagcgtctgagtagacagcaggctgatgaagagctgctaataattggtgggcttgctgtgccagtacacttgcggagtacctgttggtttgtcctgctgatgccccccaaccatgctaaataggtctgaggcacacattacatttggttgaatgagcccgttaatatcctaccacagatgaatacaatgaggtgacaggaaaacctaggaaccatgacttatgaagactggctgttaaagtagcatttatgaaaatggggtaagcacaaggctgataaaactaaaggatctggaagctcatggctagacttagtctgcagagaaaacccacccagttctacacaaagccatctccccacttttcaaaaataggtttttcacactagaattctggaaatgacttcatttggctttcctggcctgtatggatatgggtttacataacattggttacaatatatttattcc

SEQ ID NO: 8546 - DNA, 583 bp, Homo sapiens
  unsure (452): n=A,T,C or G
  unsure (454): n=A,T,C or G
  unsure (582): n=A,T,C or G
ctgggcgcatgaaagcagagttctttgcagatgtagttccagcagtcagaaagtggagagaggccggaatgaaggtgtacatctattcctcagggagtgtggaggcacagaaactgttattcgggcattctacggagggagatattcttgagcttgttgatggtcactttgataccaagattggacacaaagtagagagtgaaagttaccgaaagattgcagacagcattgggtgctcaaccaacaacattttgtttctgacagatgttactcgagaggccagtgctgctgaggaagcagatgtgcacgtagctgtggtggtgagaccaggcaacgcaggattaacagatgatgagaagacttactacagcctcatcacatccttcagtgaactatacccgccttcctcaacctagagaagggttgttaaggcagaccgccctgttccccananttgtccctgtagtgtctaggtttattctaatggtaaaagtaacttacttaaaaaacatatgtacacatatgtatgcaagtatgtatatatgtgtatgctcagattaacttccataggtacataagtgna

SEQ ID NO: 8547 - DNA, 612 bp, Homo sapiens
  unsure (485): n=A,T,C or G
catgtggagctgggacgtggagtgcgatacgtgcgccatctgcagggtccaggtgatggatgcctgtcttagatgtcaagctgaaaacaaacaagaggactgtgttgtggtctggggagaatgtaatcattccttccacaactgctgcatgtccctgtgggtgaaacagaacaatcgctgccctctctgccagcaggactgggtggtccaaagaatcggcaaatgagagtggttagaaggcttcttagcgcagttgttcagagccctggtggatcttgtaatccagtgccctacaaaggctagaacactacaggggatgaattcttcaaataggagccgatggatctgtggtcctttgggactcatcaaagccttggtttagcattttgtcagttttatcttcagaaattctctgcgattaagaagataatttattaaaggtggtccttcctacctctgtggtgtgtgtcgcgcacacagcttanaagtgctataaaaaaggaaagagctccaaattgaatcacctttataatttacccatttctatacaacaggcagtggaagcagtttcagagaactttttgcatgcttatggttgatcagttaaaaaag

SEQ ID NO: 8548 - DNA, 492 bp, Homo sapiens
cctcgtgaggcgaggcggcaaaatttgatttcttggaggacacctgagcatatacggtcaaagtctgatgacaacaccagtagggatgaagctgggagtggggtggctaagaacactggacctgacactattagacatgggttccagcttcaggtctattactgctcactgtggccgagcaacagagctacttaggtaaaatggtgatggtcataacactagcccacagggaggttacgaacctctggtgacaatgtaagtgaaaggcccctgagaaagagtgagggagttgcaaatgtcagtagccatcaagatcttctttaagaatagtttccactaaagagatgattgctttggtttccagccttctttgttttgtctccccgctgggccttctacctttaaagggctttggctctgggggaattgagttggctggggcttgatgacttccaagaggacacaagtggagatctactgcctgctcttggc

SEQ ID NO: 8549 - DNA, 524 bp, Homo sapiens
  unsure (16): n=A,T,C or G
cctatactcttaatgnactttattaaagtcccacatgagcaccgtgcaataattagagtttccccaataagtttacccaactatcaacctttattagtacttatggcttatggtgtggtttaatgtcttttttatttttcgaaaacaaatggcacttaagtgcacttcaaaaactgttaggtgatataagtaagctagaaaagtaagatcatcatgggctcttttctaacaaacgtgttgatgaaatgataagcaaaatgatgttacccctatgatatctagtaagacaccatggagcatcctagttttatccaagtactgcccaactaatgcaatttatgtcctgaatgtgcattagaatatcctgagtttcagtggcctgttaactggtaaacagtgccacagaaaacacaacactgggtagaggaaagtgggtagaggaaaatcccctgagcttaaatgatcttagatgaggtcttgttttgattttctattttatatatatttcatgttaaaatatctgg

SEQ ID NO: 8550 - DNA, 646 bp, Homo sapiens
  unsure (642): n=A,T,C or G
cctcctcgaccaaggcagggaacttcaatctgtataagtatctgcagttgctggaataatttgaagaccccatggagctaaggagattaagtggaggattttcattgtttcagaggggcaaggggcaaatccattgctaattctttaatgatgaaaaatggtaagaagttgttaaactcctttggggattttaaaaagtgatacgtaaacagaagagagagagagagagagaaatcacagtagtgaggctaacaaaaataatgataaaaaggttagaagaacccaggatacttagtggatgcctagacaacataaaaatagatttatagaaggaagcaatggaatttgaatataaaagggtatcagaaagttaatgtgttgcatctgaaattcaaagtatttccttttggctacacaagaaagacttttaataaaaccctttgtatatatttctgaaaggtaaatattttatagggaaatggaggattggaagaaaatctgttccatcatgtctgggtattagaattttgcttaataacttgccaaaatattacgcttccaagggctatggcattatgtgtgtacccaattaaagcaatttttctttgctttgtctcctaacttaaattcaaatgacatatnaacc

SEQ ID NO: 8551 - DNA, 394 bp, Homo sapiens
  unsure (8): n=A,T,C or G
  unsure (10): n=A,T,C or G
ctgaggtngncagtacaatgaaaccaaactggcgggatggaagcagattattctgccatttttccaggtctttgagttgcacgtcaaatctggggctgatcaccccacacttgtttagcctgcctgtgaggttcacaacaattttcccagctctgtggtcatcaatgatttcaaattcgccaatgtaaccatgcttcatcatcacagtgagaaaccggacgatgactttggagcacggcctaataagcacctggcgtttgcctctcttttcggcattgttgatactcttgagagcatctgccaggacattcatgcgcaccattgtggcttagattgcaggatggcgccgatggcagacggatgaaattggagctctcagagagtgctactcgcc

SEQ ID NO: 8552 - DNA, 507 bp, Homo sapiens
  unsure (10): n=A,T,C or G
ctggtatttngcctaagatctatttaagataaccttttcttatattttttacttaatattgggcataatcgtatcattcaagattaagtctgggttatttctttgataagaactgaatgtggccgggcgcagtggctcacgcctgtaatcccagcactttgggaggccgaggtgggtggatcacaaggtcaggagatcgagaccatcctggctaacacggtgaaaccctgtctctactaaaaatacaaaaattagccgggtgtggtggtgtgcacctatagtcccagaactcaggaggctgaggtgggaggatcacctgagcccaggaggtcaaagctgcagtaagctgtgattgcgccactgcactccagcctgggtaaagagtgaggccctatcttaaaaaaaaaaaagggtgggcgtgatggctcacacctgtaatcctagcactttgggaggccaaggtgggtggcttacttgaggtcaggagttcaagaccacccttggacc

SEQ ID NO: 8553 - DNA, 597 bp, Homo sapiens
  unsure (11): n=A,T,C or G
  unsure (180): n=A,T,C or G
  unsure (522): n=A,T,C or G
  unsure (565): n=A,T,C or G
cctcataaaangcaaaacaaaaattaggtattttgtcctaaaacacctggtaggagtgtgtgatttttttgcattcctgacaaaggagagcacacccaggtttggaggtcctaggtcattagccctcgtctcccgttccctttgtgcacatcttccctctccccattcggtgtggtgcantgtgaaaagtccttgattgttcgggtgtgcaatgtctgagtgaacctgtataagtggaggcactttagggctgtaaaatgcatgattttgtaacccagattttgctgtatatttgtgatagcactttctacaatgtgaactttattaaatacaaaacttccaggctaaacatccaatattttctttaatgcttttatatttttttaaaatgttaaaacccctatagccaccttttgggaatgttttaaattctccagttttttgttatatagggatcaaccagctaagaaaagattttaatcaagttgaattgaggggattaatatgaaaacttatgacctnttcctttaggagggagttatctaaaagaaatgtctattaaggngatatatttaaaaatatttttgggtgttcctg

SEQ ID NO: 8554 - DNA, 170 bp, Homo sapiens
atgtagctgatatattactataacctcacttgcatttttaaattattttactggttctctctttttacttttatcttacctatgctgtatttgaagttagttttatatagacagaattttaaaaattatttatttatggggtacaaatgcaatttggacaatattgttgg

SEQ ID NO: 8555 - DNA, 337 bp, Homo sapiens
  unsure (243): n=A,T,C or G
accacatagatagcttgacaaggagtgctgtctgtccttaccacattttcagcactcagcacagtgccttgtgtataataggcactcaatttattataaatcttcagtatgtcctgagaacagctttagtcatggaatactgggagaaggaataactttcacaaaataaacttaaaacagcctgtaattattgaggttcatattcttctggtatatcattctgagaaattgtggctaatttanaacattgtttagaattgacaaaaggccctggcaattaaattgtcaaggcccaagggctaattttaattttctttttacttggagtcattcaaag

SEQ ID NO: 8556 - DNA, 285 bp, Homo sapiens
  unsure (10): n=A,T,C or G
cctatttganagaggaaatgtatgatgaagctattcaggattatgaaactgctcaggaacacaatgaaaatgatcagcagattcgagaaggtctagagaaagcacaaagattattgaaacagtcgcagaaacgagattattataaaatcttgggagtaaaaagaaatgccaaaaagcaagaaattattaaagcataccgaaaattagcactgcagtggcacccagataacttccagaatgaagaagaaaagaaaaaagctgagaaaaagttcattgatatagcag

SEQ ID NO: 8557 - DNA, 562 bp, Homo sapiens
  unsure (35): n=A,T,C or G
  unsure (67): n=A,T,C or G
  unsure (439): n=A,T,C or G
  unsure (491): n=A,T,C or G
  unsure (514): n=A,T,C or G
  unsure (516): n=A,T,C or G
tgaataaactaggtattgatgcaacatatctcaanataataagagctatttttgacaaacccaccgncaatatcatactgaataggcaaaagctggaagcattccctttgaaaaccagcacaagacaaggatgctgtctctcaccactcctactaaacatagtataggaagttctggacagggcaatcaggcaagaaaaagaaataaagggtattcaaataggaagagagaagtcaaattgtctctgtttgcagatgacatgactgtatatttagaaaaccccatcatttcagcccaaaatctccttaagctgagaagcaacttcagcaaagtctcaggatacaaaataaatgtgcaaaaatcacaagcattcctatgcaccaataacagagagccaaatcatgagtgaactcccattcacaattgctactaagagagnaaaatacctaggaatacaacttacaagggatatgaaggacctcttgaagtanaactacaaacaactgctcaaggnanttaagagaggacacaaacaaatgaaaaagcattccatgctcatgga

SEQ ID NO: 8558 - DNA, 491 bp, Homo sapiens
ccaagaactcaaagaggcagcattggaaccatcgatggaaaaaatatttaaaattgatcagatgggaagatggtttgttgctggaggggctgctgttggtcttggagcattgtgctactatggcttgggactgtctaatgagattggagctattgaaaaggctgtaatttggcctcagtatgtcaaggatagaattcattccacctatatgtacttagcagggagtattggtttaacagctttgtctgccatagcaatcagcagaacgcctgttctcatgaacttcatgatgagaggctcttgggtgacaattggtgtgacctttgcagccatggttggagctggaatgctggtacgatcaataccatatgaccagagcccaggcccaaagcatcttgcttggttgctacattctggtgtgatgggtgcagtggtggctcctctgacaatattagggggtcctcttctcatcagagctgcatggtacacag

SEQ ID NO: 8559 - DNA, 177 bp, Homo sapiens
  unsure (10): n=A,T,C or G
  unsure (41): n=A,T,C or G
  unsure (43): n=A,T,C or G
  unsure (99): n=A,T,C or G
  unsure (108): n=A,T,C or G
  unsure (115): n=A,T,C or G
  unsure (116): n=A,T,C or G
  unsure (131): n=A,T,C or G
  unsure (133): n=A,T,C or G
  unsure (134): n=A,T,C or G
  unsure (160): n=A,T,C or G
gagtggcttnctaacggaaatggaacaggattaccaactantngacgaaagtgatgctttccatgacaaccttaggtctcttgacaggaatctgccctnagacagccnggacttnngtcaacatggattanannaggattttatgttataaaagaggatnttcccaccttgacacca

SEQ ID NO: 8560 - DNA, 512 bp, Homo sapiens
  unsure (345): n=A,T,C or G
ctggcctcattgagctgctttctaatattaacgtgtaatgatgaatccattttatcaggacagtaggctacaaattgctctttggaaaataagtcaaacttaattctcatgaaaacaacctatctctctctccatatatatacatacatacatacatacatacatacatacatacatataaacatattccaaagatcttaaggtctatgatcaggttttatcatcacaggaaatttggaaaaaagtaaaaccaacttcagactctttttaacttatggctgtgttatctaatggctctccttaactgtcattaagagataaaatagctccagtgttacagacatncccgggcggccgctcgactcttttttctctccttccgggggaccaaggtaccttctggggcatacaacatggcagcagggcctcgggaagaggggtaggaggaccgagcagcattctctgtagaggaagacaggaaaggagaccctcttggcacacatttatggagg

SEQ ID NO: 8561 - DNA, 516 bp, Homo sapiens
  unsure (390): n=A,T,C or G
tattctaaattttgtagctcctgaccttacatccttttcttccttatgtctttcagatccaggtgaacttgagagaattagagacagccactgggctccccccggggttgaaacgggtttcccagaccaggggttcagaggagactatttatccttcatgatctttggcgattctccactggagcggaagggctgtgtgtcaaaagaaggaagccaggctgtgaagggccgtgttgctttcagtgggtgggcagaggtttagaaaggtggttctgaaatggcacctggtactcttgtgggacctggggaatataaggaactctgtgcatgaggtttcaaaaataaaaattgagtccactctccccgtacacacacactcgggcacttcangaggtcagttctcaccccttcctcgatggggctttaaagctctggggagaagagctgctccccactcatgccccagagggactgtgaaaaggcttcctgtgacctccgatggcggcccctcattgg

SEQ ID NO: 8562 - DNA, 481 bp, Homo sapiens
  unsure (10): n=A,T,C or G
  unsure (11): n=A,T,C or G
  unsure (174): n=A,T,C or G
  unsure (227): n=A,T,C or G
  unsure (277): n=A,T,C or G
  unsure (370): n=A,T,C or G
  unsure (405): n=A,T,C or G
  unsure (418): n=A,T,C or G
  unsure (438): n=A,T,C or G
  unsure (476): n=A,T,C or G
  unsure (477): n=A,T,C or G
ctattttcanngttctcacaacaaaaagataaatatgtgacataagagatgtgttaagcagcttgatttaatcattccacaatataaatatatacgaagacataatactgtacccctcaaaacaattattatttatttaaaacatttaaaaacaaaaaatgagacaaatatcangaaagtaattttatacataagctagataattgcctatagctgcgtatgctgtnaaataatttctgtttgaaaagacgggaaaaattatatggcaaaaccatantgcagtaataaatttgccatgtttagtaaacaaaatatagttcaatgtgactgaagcataccaagaggcaggagaatgtggtgtacactgtantgtagaggagtgtcttagtttgggctgctatacanaataccatagatngagtggcttacaaataacanaaaaagtatttcttactgttctaggggttggaagtccnnagtc

SEQ ID NO: 8563 - DNA, 195 bp, Homo sapiens
  unsure (35): n=A,T,C or G
  unsure (74): n=A,T,C or G
  unsure (84): n=A,T,C or G
  unsure (92): n=A,T,C or G
  unsure (96): n=A,T,C or G
  unsure (108): n=A,T,C or G
  unsure (109): n=A,T,C or G
  unsure (118): n=A,T,C or G
  unsure (137): n=A,T,C or G
  unsure (187): n=A,T,C or G
tccctgcaaatgggacttacgagtttggttatcanatgcactttatttgtaatgagggttattacttaattggngaagaaattntatattgngaanttaaaggatcannagcaatttngagcggtaagcccccaatntgtgaaaaggttttgtgtacaccacctccaaaaataaaaaatggaaaacncaccttta

SEQ ID NO: 8564 - DNA, 195 bp, Homo sapiens
ccatagcttcatccttgcctttcatgcccactaaaaacttaacaagtctagcaggatgttggaatccatctcgaagttcttgtgggtcctcagcaagagcacatgacttatgatataaatcttccatactagggctagccatcagcattacctttgcactgtataagtggtcagcatctggtggatcaagaatgg

SEQ ID NO: 8565 - DNA, 572 bp, Homo sapiens
  unsure (506): n=A,T,C or G
  unsure (509): n=A,T,C or G
  unsure (517): n=A,T,C or G
  unsure (559): n=A,T,C or G
ggttcagtatctgcctcttttaggtcagagtatgctatgagtagcaatacatacatatatttttaaaagttgatacttctttatgacccacagttgacctttattttcttaaataccagggcagttgtggctcattgtgcattttactgttggcccattcatttcgtttttggaaattatggttttgtattttcatgtttatttacattcatttttgtttattcagggaaagctgatctttttttcaaaccagaaaaaaaaatgaactagatatgaagtagagttcattaaatatcttgctattgtcagagtttttaaaatatagacttaattttgtttttttaaattggaatacaataaagtactacctacatttgagtcagtcaccactcttattgtgcaggttaagtacaagttaactaaaaataaactgtcctctctggtgcaactcacaaccaagatcaagattaccttaaaatttatttgaattttttagatgttttggntgncaaactgnaaggaaacttcacaacatttaagtcttactctgtatgtaacnatccatcattcac

SEQ ID NO: 8566 - DNA, 598 bp, Homo sapiens
ctggcagatgcagaagaagcgatgtatcagaatgtggatggccgtgtttcggaatgtcctcacacctaccaaaacaggcgacctttcagcagagagatggatttggggctactctctccgcaggctcaggtcgaagattcgtagaggaacaatttagttttaaggacttcatccctccacctatccctaacaggctgtagattaccaaaacaagattaatttcatcactaaaagaaaatctattatcaactgctgcttcaccagacttttctctagaagctgtctgcgtttactcttgttttcaaagggacttttgtaaaatcaaatcatcctgtcacaaggcaggaggagctgataatgaactttattggagcattgatctgcatccaaggccttctcaggctggcttgagtgaattgtgtacctgaagtacagtatattcttgtaaatacataaaacaaaagcattttgctaaggagaagctaatatgattttttaagtctatgttttaaaataatatgtaaatttttcagctatttagtgatatattttatgggtgggaataaaatttctactacaaaaaaaaaaaaaaaaaaaa

SEQ ID NO: 8567 - DNA, 595 bp, Homo sapiens
  unsure (590): n=A,T,C or G
ccaggctggtctcgaaatcccgacctcgtgatccacccacctcagcctcccaaagtgctgggattacaggtgtgagcaacctcgcccagccccaagtttattaaaaagcactactgcaatacccaacaaattaaagggtaggtactttgaggaagtagagcctgccccctttaaaagcaggacaagctacactttcagaatagggaaaaaatgtatctgagggatttattaacacttagcaagggcaggatttaaatagtttgagcagcaaaagagtttttccagaagttttatttacttttatttaattgcagtctaaacatgtgtcttacagtgagcgttttcatataaataatttacagaaaaaggttatttacaaagccacagatctcattcagttaggtaatatggttttctagttattatgggaaaggttaacacttgattgggtctatacagtgccttaaaattgccctcaccacatgaagctctgtccagatgacaaagagaatgtatacctcttcataagtgactatatatactcctgaatccataatcactctcagacctgtgtgaagcttggttaaggngagat

SEQ ID NO: 8568 - DNA, 417 bp, Homo sapiens
  unsure (8): n=A,T,C or G
  unsure (13): n=A,T,C or G
  unsure (17): n=A,T,C or G
  unsure (30): n=A,T,C or G
  unsure (33): n=A,T,C or G
  unsure (45): n=A,T,C or G
  unsure (46): n=A,T,C or G
  unsure (58): n=A,T,C or G
  unsure (69): n=A,T,C or G
  unsure (72): n=A,T,C or G
  unsure (74): n=A,T,C or G
  unsure (99): n=A,T,C or G
  unsure (108): n=A,T,C or G
  unsure (142): n=A,T,C or G
  unsure (145): n=A,T,C or G
  unsure (155): n=A,T,C or G
  unsure (199): n=A,T,C or G
  unsure (214): n=A,T,C or G
  unsure (225): n=A,T,C or G
  unsure (226): n=A,T,C or G
  unsure (230): n=A,T,C or G
  unsure (236): n=A,T,C or G
  unsure (249): n=A,T,C or G
  unsure (311): n=A,T,C or G
  unsure (312): n=A,T,C or G
  unsure (381): n=A,T,C or G
  unsure (385): n=A,T,C or G
  unsure (394): n=A,T,C or G
  unsure (396): n=A,T,C or G
agctagantaagntggncatgatgcagaanctnctcaaatgcagnnggcttgtcctgnctcttgccctnatncnggttctggaatcctcagttcaaggntatcctacncagagagccaggtaccaatgggtgcgctgcaatncanacagtaattntgcaaactgccttgaagaaaaaggaccaatgttcgaactacttncaggtgaatccaacnagatcccccgnntgangactgncctttttccaaanacgagaatccaggacttgaatcgtatcttcccactttctgaggactactctggatcaggctnnggctccggctccggctctggatcaggatctgggagtggcttcctaacggaaatggaacaggattaccanctantagacgaangngatgctttccatgacaacctt

SEQ ID NO: 8569 - DNA, 559 bp, Homo sapiens
  unsure (519): n=A,T,C or G
cctggctcttgccctcatcctggttctggaatcctcagttcaaggttatcctacgcagagagccaggtaccaatgggtgcgctgcaatccagacagtaattctgcaaactgccttgaagaaaaaggaccaatgttcgaactacttccaggtgaatccaacaagatcccccgtctgaggactgacctttttccaaagacgagaatccaggacttgaatcgtatcttcccactttctgaggactactctggatcaggcttcggctccggctccggctctggatcaggatctgggagtggcttcctaacggaaatggaacaggattaccaactagtagacgaaagtgatgctttccatgacaaccttaggtctcttgacaggaatctgccctcagacagccaggacttgggtcaacatggattagaagaggattttatgttataaaagaggattttcccaccttgacaccaggcaatgtagttagcatattttatgtaccatggttatatgattaatcttgngacaaagaattttatagaaatttttaaacatctgaaaaag

SEQ ID NO: 8570 - DNA, 594 bp, Homo sapiens
  unsure (63): n=A,T,C or G
  unsure (190): n=A,T,C or G
  unsure (245): n=A,T,C or G
  unsure (277): n=A,T,C or G
  unsure (299): n=A,T,C or G
  unsure (312): n=A,T,C or G
  unsure (324): n=A,T,C or G
  unsure (344): n=A,T,C or G
  unsure (364): n=A,T,C or G
  unsure (366): n=A,T,C or G
tttttttttttttttttttaagaggtgagttctccctttgtgatcacgttgaagtgcagtggngggaccatagttcactatagcctccaaactcgggctccagcgattctcctgcctcaggcttctgagtagctaggactacgggtatgcaccaccatgcccagctaattttttaaaaatgttttcgtanagatgagggtctcactaaggctgcctaggctggtctcaaactcctggcctcaagnggtcctcccactttgaactcctaaagtgttgngattattggtgtaagccactgngcccagcctatanaaatgttttgcncgaatttctggaaccatcanaaaacaccagagtctgccananaagtccccaaatagcacaggaataaatggcataaaatattaataattcatgtctcagcaagggaataggcagagaacacatgttcagcaccagcagtgccaggagctgttattttgacctaacttgctccaaatgaaagtccagacacaatctctcacacaaaattcttcaccggctcaaccataacaagaatagtccctaatagcatttattaagtgctattatgtg

SEQ ID NO: 8571 - DNA, 252 bp, Homo sapiens
  unsure (10): n=A,T,C or G
  unsure (21): n=A,T,C or G
  unsure (44): n=A,T,C or G
  unsure (46): n=A,T,C or G
  unsure (49): n=A,T,C or G
  unsure (94): n=A,T,C or G
  unsure (182): n=A,T,C or G
  unsure (195): n=A,T,C or G
  unsure (196): n=A,T,C or G
  unsure (221): n=A,T,C or G
aaataaaatnaaaaaaggtcnaatgggaagctgaaaaataaatnanagntgactcttttaaaacaataataaattaaacaagcaaaaatcgacncaaattaaaattggaaattacaaaggaaagaaacaacaatcaataaacagttattaaacaaaaaaggttttaaaaaattatgatgaantactatgcacagnngtttggcaatatactatatgtaaangtgtatttaaataaattggcattctccacac

SEQ ID NO: 8572 - DNA, 142 bp, Homo sapiens
ctggggaaagaaagaggaggaagtggaaaaagagtaggaggagggtggttctctccagggcacccttcctgctttgggatggtgactcacccagcaggccctgggagaggcaatttatcagccccaacgaagacaggccagg

SEQ ID NO: 8573 - DNA, 532 bp, Homo sapiens
  unsure (20): n=A,T,C or G
  unsure (35): n=A,T,C or G
  unsure (49): n=A,T,C or G
  unsure (59): n=A,T,C or G
  unsure (62): n=A,T,C or G
  unsure (69): n=A,T,C or G
  unsure (73): n=A,T,C or G
  unsure (116): n=A,T,C or G
  unsure (139): n=A,T,C or G
  unsure (142): n=A,T,C or G
  unsure (264): n=A,T,C or G
  unsure (338): n=A,T,C or G
  unsure (403): n=A,T,C or G
gaggtctggtatagattcanttactaatgcagtanctaagaaaaaatgngacttttcantancttcacngganagttgtgtaagattccaagccatttgcatctggatctggagtngacatgttaactaaagaagtgtnttnctccttcatttctttatcatcactgtaagttttctttgttgttagtacagaataatctgtggttttgagttcagtttcagtaaatgtctgtgaatcaaagattgtttgttctgttgcagganagttttgaggggattcaaatgacttttcttcttgaatttgttcctctgatgttgtttcactttcaatttcttgncttacagggttgacttcttgcctagaccataatttggctggctctatagtttggggaaagtttgntgaaactgtgccactgacctttacttcctccttctctactggagctttcgtaccttccacttctgctgttggtaaaatggtggatcttctatcaatttcattgacagtacccacttctcccaatccttc

SEQ ID NO: 8574 - DNA, 592 bp, Homo sapiens
ggcaacccaaggaaaggaaatcacctcggtcggcagtgtgactgctgagactgccggggctgctgcctgctgcttctcgcgcctgtcctctccaagatgcagttttttgatgctgaggagctcctggtcgatgaagaggatgatgtttttggtgaaggtaaatgcatctttctggcaggaggctctccggtctgctttgctttgttttgacaccactggacacttttgcccagcttgggcaaggacttgagtattttgaaatgataaaaacaaagcatcctgagtgaggtagtggctgcaaatatcaacttaggcactgaaggaatacacaaggcaaggggtggaacaaggggttgagtcattcccgcaaatacattttttaaagtcatgactaaaataaaggtttagtttaggctggaaaatagtactaaattttttgccttgtctctcttctgtgctatctcttgtctaacaccttaaggaaagcctgtcacagtggtttgagcacagcagggctgctagggaagaagttaaataaatggaccaggagtggtttttcatggtaccatgttgctttgatttgcacttctct

SEQ ID NO: 8575 - DNA, 337 bp, Homo sapiens
ccaggaaaaagaaagaaaaacaaaacaaaacagaaaaggtcgatcttgccttgaaagcgggcagtggctattttcttctctctgccaaagcaggacacgttattcttaacacagagggccacatcgctgtccctcacaaatacttcagacagttgtcttcaacatcctgtggttcttcgtccgattccttttttttttttgagatggagtctcgctctgtcccccaggctggagcacagtggtgccatcttgacttactgcaacctccacctcccgggttgaagggattctcctgtctcagtccccccaaatacctgggattacaggcgcccgccac

SEQ ID NO: 8576 - DNA, 255 bp, Homo sapiens
  unsure (7): n=A,T,C or G
  unsure (48): n=A,T,C or G
  unsure (87): n=A,T,C or G
  unsure (91): n=A,T,C or G
  unsure (128): n=A,T,C or G
  unsure (131): n=A,T,C or G
  unsure (168): n=A,T,C or G
  unsure (170): n=A,T,C or G
  unsure (210): n=A,T,C or G
  unsure (233): n=A,T,C or G
  unsure (242): n=A,T,C or G
tttgtantcttccaagttcagagatctccttggagccccatccttggntggcggagccttggaggtgatggctaaagcctttgactntganctgggaacttgtaagtcaatcttcacatcaaaatcgngtnctttgaacagatcttctaagaggtcactggctgactnanaattcaaatctttatctttgccttgacccttgctcatttnctttggagcatctggtaacactncagaaccgnattttgcattcag

SEQ ID NO: 8577 - DNA, 428 bp, Homo sapiens
ccaaggaatggcattgtgcagaggcataccgggaagctctctggatgcaaccccacctctaccgcttggcagtcaatgaccttggcatgatgtttcttcacttctctgaggctaggtctttgattctgaacatggggactgtaatgcctgcctgacctgtgttagaacagcatgtgtcactgagtggaggtgggaggaatttgtaaactgtgaagtgctagccacacaggtgggaaaggtaagcctatcctgtagagctctgctgccctgacaatgcctgggatttggccttcttttctggagcacactaaggcaatcttggctagtgcatcagacgggagtgagccccagtgactgagtaaatggagaataagacaaggaacacgagcatccggcctgtgcagacatacaagcagaataaaccacag

SEQ ID NO: 8578 - DNA, 551 bp, Homo sapiens
ccagcatttgacagtggaatgtcttcccaggatgtacacattttccccaataatcttgaacacttcccatttacctctagagcatctttcttgtcctgattaaggaggtatccttctcttgctctctctcagttgaggttattttgtaggaaaaaatgattgtagccagggcttgaaagtggcagggaataagtttgagtgtcccctatctttcctcatgacagtgctggagcattagcacaaagcctgtctatcatcatgggaaataatcccacccaaacacactgggaagacgtgagggtgtctccttggtcttattagcctagcagaaggacagaaagatgaagggatgtggggttgcggggaatgagaagcgctgaacacctggaatttgttcccttgggccgacaggttgcagcttgcttgctgttctccctctgtctgagaacacttcgtatttaacactctctaattctgcttgcacatcctctacttccttccttcttttcacctctcaaggtttgtgcccaaatatggctctatttcagctc

SEQ ID NO: 8579 - DNA, 473 bp, Homo sapiens
  unsure (22): n=A,T,C or G
  unsure (246): n=A,T,C or G
  unsure (254): n=A,T,C or G
  unsure (255): n=A,T,C or G
  unsure (258): n=A,T,C or G
  unsure (281): n=A,T,C or G
  unsure (301): n=A,T,C or G
  unsure (302): n=A,T,C or G
  unsure (415): n=A,T,C or G
ggtcttgaactcctgacctcangtgatctgtctgtcttggccttctagagtgctgggattacagggttgagccaccgcacccagccgggatataaatatatttaatcttcacaccaactcatgatgtaggttctattataaattccattttatagatgatgaaactgaggcacagcgaggttaggttatttgcctaaaatcgtcacagtaagagacagagcaaggatttgaacccaaacaatctgnctccaganncancgtccttaaccactgttctctcntgcttttttgtaagtacatnnacataattttcaggagaaaggttgtgctagactttgtagaaaaatcttttctcatcctaatgtgagaaatatctgccatggttcaatgtatgtgagtgtgttatatctttcangagtgttggggtgggaaaaaagtttgagaagtactatcctaaagagtattttgtctta

SEQ ID NO: 8580 - DNA, 265 bp, Homo sapiens
ccattttcttttttcaccttaaaggtcaaacatgaaacaatgaggaatgtaggtctttgtaaaacacataaatacctgtgatgttttgaatcatttggcccttaaaaatattgcttaacaagttaaacccagcttaattgtaggtaaatgcaagtatacccaaggctggactattttagtctgcttttggctgcagattgtacttctgtggctggaaaaaatgttcttcaatagcactgaccagttcattcagttccttcttcag

SEQ ID NO: 8581 - DNA, 369 bp, Homo sapiens
  unsure (9): n=A,T,C or G
  unsure (19): n=A,T,C or G
  unsure (68): n=A,T,C or G
  unsure (172): n=A,T,C or G
ggttattcnagtgaccganaccgcggccgggaccgagggtttggtgcacctcgatttggaggaagtanggcagggcccttatctggaaagaagtttggaaaccctggggagaaattagttaaaaagaagtggaatcttgatgagctgcctaaatttgagaagaatttttatnaagagcaccctgatttggctaggcgcacagcacaagaggtggaaacatacagaagaagcaaggaaattacagttagaggtcacaactgcccgaagccagttctaaatttttatgaagccaatttccctgcaaatgtcatggatgttattgcaagacagaatttcactgaacccactgctattcaagctcagggatgg

SEQ ID NO: 8582 - DNA, 588 bp, Homo sapiens
  unsure (574): n=A,T,C or G
ctgagacgggaactgaattcttccccaggaagaaaatacctatacccacaataggtctgcaaaatctcccacaggcacctcttctccctttcttgtggttgtttgttaattggtttgttttgcctaaaagcaagatggcaatcttaatcaaaaagggaagctagatttttaaaataacttaaaaaaaccatttttatataaagcagcaaaaacatatcttcctctctgcagaaagaaaaatgttaacaaggaaacacagcgatgtgaacggactgtccgtcaactcctgctccactggatcccccatccagcttcacctcgagctactccttaactccagcagtgctgtctgaagaagatcctttggcgtcttcaactgctcttttactttcttgattgagactttcattttcggacctggtcccattagggatagagttttcaccgtttacaagcccgttttctgtggcctttgctttgctgattgcctctctgatgttcaaggcatcctgcactccagcctcctcctcgaggtttctcaagaccagggggagcctcgagtcccccacgctgntctccaacagccca

SEQ ID NO: 8583 - DNA, 518 bp, Homo sapiens
  unsure (510): n=A,T,C or G
cttggccatcctgctctttgtatatgaacagaagctgaatgagtatgtggctaagggtctgaccgacagcatccaccgttaccactcagacaatagcaccaaggcagcgtgggactccatccagtcatttctgcagtgttgtggtataaatggcacgagtgattggaccagtggcccaccagcatcttgcccctcagatcgaaaagtggagggttgctatgcgaaagcaagactgtggtttcattccaatttcctgtatatcggaatcatcaccatctgtgtatgtgtgattgaggtgttggggatgtcctttgcactgaccctgaactgccagattgacaaaaccagccagaccatagggctatgatctgcagtagtcctgtggtgaagagacttgtttcatctccggaaatgcaaaaccatttatagcatgaagccctacatgatcactgcaggatgatcctcctcccatcctttccctttttaggtccctgtcttatacaaccaganaagtgggt

SEQ ID NO: 8584 - DNA, 276 bp, Homo sapiens
  unsure (6): n=A,T,C or G
  unsure (246): n=A,T,C or G
  unsure (250): n=A,T,C or G
cattgncagttcttgtctagttttcattaaaagaacaaagatcttttatatggatatcttataaatatataatcattgctaagtaagaagttaagttgttgctatcgcaacaatcctggcagacaattgagtaatattttgatgacttattttgtttgtaattagttattataagaagatctagatcctagatattagaataaaatttattttctactgtatccatttcaaatgttaaaatattgnttantatttttgaaatccctgagtatcagg

SEQ ID NO: 8585 - DNA, 389 bp, Homo sapiens
  unsure (239): n=A,T,C or G
ccaggaaaaagaaagaaaaacaaaacaaaacagaaaaggtcgatcttgccttgaaagcgggcagtggctattttcttctctctgccaaagcaggacacgttattcttaacacagagggccacatcgctgtccctcacaaatacttcagacagttgtcttcaacatcctgtggttcttcgtccgattcctttttttttttgagatggagtctcgctctgtcccccaggctggagcacagnggtgccatcttgacttactgcaacctccacctcccgggttgaagggattctcctgtctcagtccccccaaatacctgggattacaggcgcccgccaccacgcccggctaatttttgtatttttaatagagacatgctttcaccatgttgg

SEQ ID NO: 8586 - DNA, 223 bp, Homo sapiens
ctgtttgaccgaacaggtgatggcaagatcctgtacagccagtgtggggatgtgatgagggccctgggccagaaccctaccaacgccgaggtgctcaaggtcctggggaaccccaagagtgatgagatgaatgtgaaggtgctggactttgagcactttctgcccatgctgcagacagtggctggggctctcagccgcccaaggggaggacaacagaggtcag

SEQ ID NO: 8587 - DNA, 451 bp, Homo sapiens
  unsure (16): n=A,T,C or G
  unsure (28): n=A,T,C or G
  unsure (48): n=A,T,C or G
  unsure (50): n=A,T,C or G
  unsure (68): n=A,T,C or G
  unsure (72): n=A,T,C or G
  unsure (79): n=A,T,C or G
  unsure (100): n=A,T,C or G
  unsure (154): n=A,T,C or G
  unsure (157): n=A,T,C or G
  unsure (163): n=A,T,C or G
  unsure (170): n=A,T,C or G
  unsure (174): n=A,T,C or G
  unsure (186): n=A,T,C or G
  unsure (194): n=A,T,C or G
  unsure (196): n=A,T,C or G
  unsure (204): n=A,T,C or G
  unsure (232): n=A,T,C or G
  unsure (246): n=A,T,C or G
  unsure (262): n=A,T,C or G
  unsure (308): n=A,T,C or G
  unsure (329): n=A,T,C or G
  unsure (362): n=A,T,C or G
  unsure (366): n=A,T,C or G
  unsure (399): n=A,T,C or G
  unsure (429): n=A,T,C or G
tggattggatatggtnggagtggcacanactggatctgggaaaacatngncttatttgcttcctgccnttgnccacatnaatcatcagccattcctaganagaggcgatgggcctatttgtttggtgctggcaccaactcgggaactggcccancangtgcancaagtanctgntgaatattgtanagcatgtngnttgaagtntacttgtatctacggtggtgctcctaanggaccacaaatacntgatttggagagaggngtggaaatctgtattgcaacacctggaagactgattgactttttanagtgtggaaaaaccaatctgngaagaacaacctaccttgtccttgatgaagcanatanaatgcttgatatgggctttgaaccccaaataangaagattgtggatcaaataagacctgatangcaaactctaatgtggagtgcg

SEQ ID NO: 8588 - DNA, 588 bp, Homo sapiens
  unsure (484): n=A,T,C or G
  unsure (535): n=A,T,C or G
  unsure (554): n=A,T,C or G
  unsure (561): n=A,T,C or G
caaattttcctgaagaaaagtaggaaattattatttataagtataattaaagagagatctttaatttcttttttttttttttttgagacggagtctcgctctgtcgcccaggcgcaatctcagctcactgcaacctccacctcccgggttcatgccataaagaaaggtttcttatttggattcagctaatactcatggaatgcattttctttaacacctttttatcataaaatacaatcttttactttggctgtgcaattgatacctttatttttccttaaaatattgtaatagcatagatatatggtatatacttcctgcttgctgtgctgtcttataagaaatccagaaacatagaaacattatggcatttcccagttagtgtttaacaaagtctattagcagatcctagtgattataggataaataacaaacttaattatcagggttaatttaggattatcaaccatatgtttttcattgngaattatcagttggtctatagatggaaaatataagatgtataatgtattancttaaaaaatgctcttcanagagtgnctagaattatagaatttaaaaattttg

SEQ ID NO: 8589 - DNA, 433 bp, Homo sapiens
  unsure (348): n=A,T,C or G
  unsure (398): n=A,T,C or G
  unsure (399): n=A,T,C or G
  unsure (400): n=A,T,C or G
cctcaaccaagagggttgatggcctccagtcaagaaactgtggctcatgccagcagagctctctcctcctccagcaggcgccatgcaagggcaggctaaaagacctccagtgcatcaacatccatctagcagagagaaaaggggcactgaagcagctatgtctgccaggggctaggggctcccttgcagacagcaatgctacaataaaggacacagaaatgggggaggtgggggagccctatttttataacaaagtcaaacagatctgtgcgttcattcccccagacacacaagtagaaaaaaaccaatgctgtggtttctgccaagatggaatattcctcctcctanttccacacatggcgtttgcaatgctcgacagcattgcactgggctgctgnnntctgtgttctggcaccagtagcttgggccccat

SEQ ID NO: 8590 - DNA, 319 bp, Homo sapiens
cctgtgaagtacagtcagaagtacagatggatgaaagaagaaactggcaaagaactgagtggaaggccctgtgaactgggggactcgtggtggaaagctaggccacctcaccctacattcgaccttgaaagacgcagtgtttggcctgctgccctgaagcccacacgtttaccagtggtgcagtgccagcagcatcttgtgagcccctctgaagccaaatgctggcttccctgggggaacaaagtaaagctcctgtttgacaagcttcagacagaggcagtgtctgtgctgccagggagagcccaggctcaggagatgg

SEQ ID NO: 8591 - DNA, 208 bp, Homo sapiens
ctgcagcggctgtgtgtgctgctggatgtttacctggagaccgagagccatgacgacagtgtggaggggcccaaggaatttccccaggagaagatgtgtctgcggctcttcaggggtcctagcaggatgaagccatttaaatacaaccatcctcagggattcttcagccatcgctgatctcccgcgcagaccgttgtttcccccaagg

SEQ ID NO: 8592 - DNA, 597 bp, Homo sapiens
cctcagttgtcacttccacaaaagaggataataaagtactaccatacaaggtcacagtgaggatgaagggcagttcttaacatggcagccaacacacagtaagtgctccctttaagctattcattccaattcttatccagaaagataaccagtaaggactagaaatgtggtcatataaattatgtacagagctgttttcccctcatacttaacccctgcccttgaactcagcaatgagcgagccctcaggggctgtctctgcggggctgcacatgaactgcttgcgtgtataacttgtataacctcccaacgtgcctctcacaatgcatgaggcaggagctctggaactatcagctcccaactcctcaagcccaaagtgaagaaaattcaaaacagtacatatgactgtcaatggtcttcattcatttatatccatattaaaattagtttgcatttcttttacatgtatcttttgatggatgtcagaagaaaattattcagagatttaaaagtgacacagataagccactaaatagataacagataacatagatgagaaatgaaacaactatatgtatattctgaggagttagttaa

SEQ ID NO: 8593 - DNA, 332 bp, Homo sapiens
  unsure (5): n=A,T,C or G
  unsure (6): n=A,T,C or G
  unsure (19): n=A,T,C or G
  unsure (28): n=A,T,C or G
  unsure (36): n=A,T,C or G
  unsure (48): n=A,T,C or G
  unsure (76): n=A,T,C or G
  unsure (96): n=A,T,C or G
  unsure (106): n=A,T,C or G
  unsure (134): n=A,T,C or G
  unsure (174): n=A,T,C or G
  unsure (238): n=A,T,C or G
  unsure (270): n=A,T,C or G
  unsure (287): n=A,T,C or G
  unsure (293): n=A,T,C or G
  unsure (307): n=A,T,C or G
  unsure (313): n=A,T,C or G
  unsure (316): n=A,T,C or G
  unsure (320): n=A,T,C or G
cttgnnttggtaatctacngcctgttanggataggnggagggatgaantccttaaaactaaattgttcctctacgnatcttcgacctgagcctgcngagagagtanccccaaatccatctctctgctgaaaggncgcctgttttggtaggtgtgaggacattccgaaacacggncatccacattctgatacatatttaatcttatgttgatttcaccatgtggctgctcctgcttcanaacttctgcagtgtcccaggacttcttgctgnctttgtgttacccttgnccttgnttttcccaggcatnctctgnggngggntttccctctgcg

SEQ ID NO: 8594 - DNA, 358 bp, Homo sapiens
ggttccctgcccacagaccttccaggagaatgacctgagcaccttctttcccttcatctttgaagaagaacctatcttcttcgacacatgggataacgaggcttatgtgcacgatgcacctgtacgatcactgaactgcacgctccgggactcacagcaaaaaagcttggtgatgtctggtccatatgaactgaaagctctccacctccagggacaggatatggagcaacaagtggtgttctccatgtcctttgtacaaggagaagaaagtaatgacaaaatacctgtggccttgggcctcaaggaaaagaatctgtacctgtcctgcgtgttgaaagatgataagcccactctacag

SEQ ID NO: 8595 - DNA, 583 bp, Homo sapiens
ctgcagttccaggtcctgaagttccattcggactgaatttctcaaaccctggagctgatcaacttcaaacctctcctcctcagtcatatgatgataaaccatggtttgctgacgcagcattgccaattctaaatccatcatttgtgttctaaacaaattcaggctccgcctcattacctggagctcctgaaaagtattttcataaagaggtagaacagatgatttctgagtactatatggagcagcagcaggatcaggtcctctcatcatagggtacttcaaaaaagtaaaagtaggattaaaaccaatgttaaagtgaatacttccaaatcacttaaggggttaaaaggcagaatttggggcctatatatttttctctttaagacaaaaggatccaaaaaaccttcatattgtaagcaggaaaaaagaaatcagttcccaatgactcgagcggccgcccgggcaggtccatggacaagctgaggaagatgctggttccctgcccacagaccttccaggagaatgacctgagcaccttctttcccttcatctttgaagaagaacctatcttctttgacacatg

SEQ ID NO: 8596 - DNA, 418 bp, Homo sapiens
ctgaaaggagagagctgactgtcctggctgatggacaggagatcctcttagcactaccctaaggcaggcagttgggcattggtgtagacaacaggaaagtccaggctatagccgtactcaaaaacctttctgttccctttctgccagccctagggattgagtccacattcagcacaggactctctgggtacagctctctttaggaagacacaaattgcatggtgaagtcagttatatcctggccgcctttggtccctcccaggaagacgggcatgttttctgcttgagaggtgctgatgtaccagttggggaactgggcagactcaaattccagcttgttattgatttctatcttgttgaagacaaatcgcttttccatcttcttctttgggtaatttttgggatctacactctccag

SEQ ID NO: 8597 - DNA, 272 bp, Homo sapiens
cctgctggttgatcccaaatccacgtagaacggttccaactgcagcggggaagatgggctggtttaaaataaaaaaccaggtattgtttcactggtgccagaacacccagctcttcctggtattatggggtctgcagaccaggtggaccccgggaataggcaggggctatagtcgcattttcagaaggtgatctggagccatggaaaatgccctactctctggcagttctaccagccaccctcagaccacagcttccctgaaggctgtgcag

SEQ ID NO: 8598 - DNA, 252 bp, Homo sapiens
ctggcttcccacttcttggtacccggttaactgccaggtgggtgacagtgatgccaggctcgcccactactgcactggacacaacctcaccaatgccaccttcataataatggtcctccacggtgaggatcctgcccttggtggcacgagcgctgtcgagaatgagttttctgtccaggggcttgatggtgaaggggtccagcacgcggatgttgatcttttctttcttcagcagttcggcagcggccaagg

SEQ ID NO: 8599 - DNA, 287 bp, Homo sapiens
ctggtattttgcctaagatctatttaagataaccttttcttatattttttacttaatattgggcataatcgtatcattcaagattaagtctgggttatttctttgataagaactgaatgtggccgggcgcagtggctcacgcctgtaatcccagcactttgggaggccgaggtgggtggatcacaaggtcaggagatcgagaccatcctggctaacacggtgaaaccctgtctctactaaaaatacaaaaaatattagctgggtgtggtggcgggtgcctgtagtcc

SEQ ID NO: 8600 - DNA, 270 bp, Homo sapiens
  unsure (151): n=A,T,C or G
  unsure (153): n=A,T,C or G
  unsure (155): n=A,T,C or G
  unsure (183): n=A,T,C or G
  unsure (205): n=A,T,C or G
  unsure (254): n=A,T,C or G
ctgcgggggctgcacgctctggagctccgtgaagttgttctcggcgaagctctcgaactcgctgtgcacgtggtgggggtggaagtcccagtaatggtcgctatggctctccccatcactgctgagataggggtaatactcgtgcgtttgncntnggtatagatccgtgtcatagggcaccangtcttctgatggaggggggacnaggggaaacccttccattttgcacgcctgtaacatccagccgggctccnagtcggtcagatcccc

SEQ ID NO: 8601 - DNA, 327 bp, Homo sapiens
ctgagttgctttaccttatcccacctggctcttacgcagtctgttccaagtgagaagttagcagagtcctgtaaacaaagaacagttcaggggccaacctgcgctcccaggtgccaggatgctctcagggtcttcactgtgctcccaggtgccagggtgctcccatggtcttcactgtgctcccagacacttggcttcattgttctcattttgatcctcatttggcatctctaaacgcaggcggtgcagggaatgcacaaagaagcgaggaagtttgcagaccaagttgagttcctccttcccggaccccagggcaggcaggatcag

SEQ ID NO: 8602 - DNA, 549 bp, Homo sapiens
ccgcgcgctgcacaatggcggctctgaagagttggccgtcgcgcagcgtaacttcattcttcaggtacagacagtgtttgtgtgttcctgttgtggctaactttaagaagcggtgtttctcagaattgataagaccatggcataaaactgtgacgattggctttggagtaaccctgtgtgcggttcctattgcacagaaatcagagcctcattcccttagtagtgaagcattgatgaggagagcagtgtctttggtaacagatagcacctctacctttctctctcagaccacatatgcgttgattgaagctattactgaatatactaaggctgtttataccttaacttctctttaccgacaatatacaagtttacttgggaaaatgaattcagaggaggaagatgaagtgtggcaggtgatcataggagccagagctgagatgacttcaaaacaccaagagtacttgaagctggaaaccacttggatgactgcagttggtctttcagagatggtagcagaagctgcatatcaaactggcgcagatcagg

SEQ ID NO: 8603 - DNA, 201 bp, Homo sapiens
ggatgccgccatccagagggcagaggtccaggtcctggaaggagcacttcatctgtttagggccatcagcttcaaagaacaagtcatcctcattgccactgtaataagccatcatttcactggcgagctcaggtacttctgccatggctgcttcagacacttgagcaatgaagattggctgaagagaatcccagagcagcc

SEQ ID NO: 8604 - DNA, 556 bp, Homo sapiens
  unsure (523): n=A,T,C or G
  unsure (533): n=A,T,C or G
  unsure (540): n=A,T,C or G
ccaccatccttgggaccgcctgcctggccttacctccttcttgcccattcagatgcactggtaccgggccacccaccaggaagccatcaactgctatgccaatgagacctgctgtgacttcttcacgaaccaagcctatgccattgcctcttccatcgtgtccttctacgttcccctggtgatcatggtcttcgtctactccagggtctttcaggaggccaaaaggcagctccagaagattgacaaatctgagggccgcttccatgtccagaaccttagccaggtggagcaggatgggcggacggggcatggactccgcagatcttccaagttctgcttgaaggagcacaaagccctcaagacgttaggcatcatcatgggcactttcaccctctgctggctgcccttcttcatcgttaacattgtgcatgtgatccaggataacctcatccgtaaggaagtttacatcctcctaaattggataggctatgtcaattctggtttcaatccccttatctactgncggagcccanatttcanaattgccttccaggag

SEQ ID NO: 8605 - DNA, 587 bp, Homo sapiens
ctgtgttggtagtaagtgttttgggtataaggtataaaacagaaattagatcagaaaagtgcagggggaagaccactgccaaagagtaatctccaagaacttggtattttccaccgtgaggcagatactgtggggtcatcgctaagtggtttgagtatctgaagccactcattaagatactcaacaagacctaatgcatctgggatgttgtccccttctgaaacaaatttcagcagaactgccatttggatttctttagaacagctttcatcatagagtgtttttgtgatacctcctcccggaatgcggatacaaaactcggaatcatctatttcaggaatgcaccggcttttttccatttcttcccagttaaggctctttattttattttgaacacttttttgcatggaaggtgtaagtaggtaccggaagggagtactacgaagctgcagatcattacgctgatatgaatgactgcttgaaagaacaatgactctggcacagccactgcttttcacccaggaaagcagtttttcacagaatggctttgatttatacttaataaaaatggatcttaactgtagagc

SEQ ID NO: 8606 - DNA, 499 bp, Homo sapiens
  unsure (185): n=A,T,C or G
  unsure (206): n=A,T,C or G
  unsure (213): n=A,T,C or G
  unsure (231): n=A,T,C or G
  unsure (458): n=A,T,C or G
  unsure (492): n=A,T,C or G
ccttttggggataaaacagtttctcttaagtggtgaaaaagctacattttgttctttcagtctaatcttgttttctgctatgattttcttgcgctgttccagataaggtccaaaacttggcagtttcttgtccatgagttcagctatacgtggaactggtttccctttctggtgactcacagtanctggactctgtccatcccagncttgtanttcttcaatgcttttcanataaagcagggctttgaggccagtgcagtagtcttcgatcacagtgaaatcctgattctgaatggcactgcatacctggaggacggaagcaccactatggagaaactgaagaccactttcagcagagtcaattccaccagtagccaaaatgggaaatccaggcagagcacgagcaatggaggtcacagctctcaaagcaataggtctgattgctgtcccagacactnctccatatgtagttcgctttgcaatccccactgntggccaa

SEQ ID NO: 8607 - DNA, 550 bp, Homo sapiens
  unsure (525): n=A,T,C or G
  unsure (533): n=A,T,C or G
ccatatcatgtaccaaaagttgctgaagtttctcttctagctggtaaagtaggagtttgcatgacttcacactttttttgcgtagtttcttctgttgtatgatggcgtgagtgtgtgtcttgggtaccgctgtgtactactgtgtgcctagattccatgcactctcgttgtgtttgaagtaaatattggagaccggagggtaacaggttggcctgttgattacagctagtaatcgctgtgtcttgttccgccccctccctgacaccccagcttcccaggatgtggaaagcctggatctcagctccttgccccatatcccttctgtaatttgtacctaaagagtgtgattatcctaattcaagagtcactaaaactcatcacattatcattgcatatcagcaaagggtaaagtcctagcaccaattgcttcacataccagcatgttccatttccaatttagaattagccacataataaaatcttagaatcttccttgagaaagagctgcctgagatgtagttttgntatatggntccccaccgaccatttt

SEQ ID NO: 8608 - DNA, 93 bp, Homo sapiens
ccaatctgtcaggagcagaagtgacagggcatttaaacaccactaagagatcctctgattctccttgcccatcagctcagcacctcagaccag

SEQ ID NO: 8609 - DNA, 222 bp, Homo sapiens
  unsure (6): n=A,T,C or G
  unsure (7): n=A,T,C or G
  unsure (16): n=A,T,C or G
  unsure (58): n=A,T,C or G
  unsure (61): n=A,T,C or G
  unsure (69): n=A,T,C or G
  unsure (86): n=A,T,C or G
  unsure (90): n=A,T,C or G
  unsure (102): n=A,T,C or G
  unsure (114): n=A,T,C or G
  unsure (120): n=A,T,C or G
  unsure (123): n=A,T,C or G
  unsure (147): n=A,T,C or G
  unsure (178): n=A,T,C or G
  unsure (199): n=A,T,C or G
  unsure (211): n=A,T,C or G
  unsure (213): n=A,T,C or G
gaaaanntgggaggtnaactttcctctgaagataaggagaccatggaaaaagctgtanaanaaaagatngaatggctggaaagccnccangatgctgacatngaagacttcaangctaanaanaaggaactggaagaaattgttcanccaattatcagcaaactctatggaagtgcangccctcccccaactggtgaanaggatacagcananaaagatgag

SEQ ID NO: 8610 - DNA, 592 bp, Homo sapiens
  unsure (554): n=A,T,C or G
  unsure (565): n=A,T,C or G
  unsure (569): n=A,T,C or G
ctgaagacaagggtacagggaacaaaaataagatcacaatcaccaatgaccagaatcgcctgacacctgaagaaatcgaaaggatggttaatgatgctgagaagtttgctgaggaagacaaaaagctcaaggagcgcattgatactagaaatgagttggaaagctatgcctattctctaaagaatcagattggagataaagaaaagctgggaggtaaactttcctctgaagataaggagaccatggaaaaagctgtagaagaaaagattgaatggctggaaagccaccaagatgctgacattgaagacttcaaagctaagaagaaggaactggaagaaattgttcaaccaattatcagcaaactctatggaagtgcaggccctcccccaactggtgaagaggatacagcagaaaaagatgagttgtagacactgatctgctagtgctgtaatattgtaaatactggactcaggaacttttgttaggaaaaaattgaaagaacttaagtctcgaatgtaattggaatcttcacctcagagtggagttgaaactgntatagcctaancggnttgtttactgcttttcattagca

SEQ ID NO: 8611 - DNA, 499 bp, Homo sapiens
  unsure (477): n=A,T,C or G
ccttttggggataaaacagtttctcttaagtggtgaaaaagctacattttgttctttcagtctaatcttgttttctgctatgattttcttgcgctgttccagataaggtccaaaacttggcagtttcttgtccatgagttcagctatacgtggaactggtttccctttctggtgactcacagtagctggactctgtccatcccagtcttgtagttcttcaatgcttttcagataaagcagggctttgaggccagtgcagtagtcttcgatcacagtgaaatcctgattctgaatggcactgcatacctggaggacggaagcaccactatggagaaactgaagaccactttcagcagagtcaattccaccagtagccaaaatgggaaatccaggcagagcacgagcaatggaggtcacagctctcaaagcaataggtctgattgctgtcccagacactcctccatatgtagttcgctntgcaatccccactgctggccaa

SEQ ID NO: 8612 - DNA, 590 bp, Homo sapiens
  unsure (552): n=A,T,C or G
  unsure (573): n=A,T,C or G
ctgaaaaagagtgatcctcaatatcctaactaactggtcctcaactcaagcagagtttcttcactctggcactgtgatcatgaaacttagtagaggggattgtgtgtattttatacaaatttaatacaatgtcttacattgataaaattcttaaagagcaaaactgcattttatttctgcatccacattccaatcatattagaactaagatatttatctatgaagatataaatggtgcagagagactttcatctgtggattgcgttgtttcttagggttcctagcactgatgcctgcacaagcatgtgatatgtgaaataaaatggattcttctatagctaaatgagttccctctggggagagttctggtactgcaatcacaatgccagatggtgtttatgggctatttgtgtaagtaagtggtaagatgctatgaagtaagtgtgtttgttttcatcttatggaaactcttgatgcatgtgcttttgtatggaataaattttggtgcaatatgatgtcattcaactttgcattgaattgaattttggttgnatttatatgtattatacctgncacgcttctagttgctt

SEQ ID NO: 8613 - DNA, 591 bp, Homo sapiens
  unsure (492): n=A,T,C or G
ctgacacaggctgcaaacaaatgtcctctcatcctcaccgcaatccctacaagctgctcacctcctgttgccatgtggatgtgtcctgagtggcccacgcagatttctacacttgatcccctcgcttgaaataaaaggagataaagtgagtacaaacacccttatgtattactgtagctcaaacgaggccagactagatcctaaagaagacctggcgtgggccatcttctagagtcatcccacctcccaggacaagcaaaggtcctgcctccaagtcattgcaacttatatgacacagcaaggcaatatagactctgggggaaaaagttttttaactacagtatttttaaaatagaacattattttgaaattacttcgacatctactgtcaggtgacttgtaaaagcgcttgtatgttaaatgctctacattaggagattattttgttcttgagtccctacagagaattccttgggaatgaagtgctattgngcattcagaattatgtggctatagccatattgcaggccgggaactcaggaatgtcccctctgtcccagctcttcaagttgggccctacagatcccacgg

SEQ ID NO: 8614 - DNA, 394 bp, Homo sapiens
cctactatgggtgttaaattttttactctctctacaaggttttttcctagtgtccaaagagctgttcctctttggactaacagttaaatttaccctggctcaacaaaagggctggggattggccctgaaaggagagagctgactgtcctggctgatggacaggagattctcttagcactaccctaaggcaggcagttgggcattggtgtagacaacaggaaagtccaggctatagccgtactcaaaaacctttctgttccctttctgccagccctagggattgagtccacattcagcacaggactctctgggtacagctctctttaggaagacacaaattgcatggtgaagtcagttatatcctggccgcctttggtccctcccaggaagacgg

SEQ ID NO: 8615 - DNA, 558 bp, Homo sapiens
  unsure (513): n=A,T,C or G
ccaagggctaagagagaagagattgcatttaagataccctttggagtctggaaagcacctggatttcttgggagaggagcctggatttcttgggagaggagggctgtggaagccccaatcagttcttcttcgttttgggagtgtcatatttcctcttgctggagtaccacaatagcagggggatgccgatggagggaagggtcatgaccccaaaggctgcccagtccagaaaatgaggggagaatcgcctgtcaaactcccgctgagccaggattcctccctgtccaggtgcactggtagagccaatcacaacgggcccatcctcctgggccaggtaagtaattgttgccgaggtgaagttgaaataaccagccttgagagggcgcaggaccacagtgtgggagacattgctagcaggggcaatccggtcccatttgacattgagcattccagacacaatgccaaagtcttctggagggaaggaatcatcagatagttccacgtctaatgcancacttgagccaacattgtagatgttgtactgcaaggtcaggtctc

SEQ ID NO: 8616 - DNA, 420 bp, Homo sapiens
  unsure (307): n=A,T,C or G
  unsure (394): n=A,T,C or G
ctgttcttctttttgttcctgacatttcagctcttcttctaaatgtctgtcttcttgaaggctggaaattaccttcttctcatgaccagaatccaaagagatttctaaatcccactttttctttcttttcagttctttacgtattgtcacccagagaacagtgttcactaaaaacattattcccactgccagatagaaaaggacatgaaaccagacaggagttggtaactggaggccaagcacttgaagctccaactcagggctgcgcttaaggacatttccatcctctgtggcagcctcgcaccantataacccagagtcttctcttctagcagttagtatttggtattcagaggatgtgttcctgcctcgcggggtcttgctgcccatgtanaaggagaagtaaagctgcaaaccagg

SEQ ID NO: 8617 - DNA, 183 bp, Homo sapiens
cctttctgtttgatgcctgctcgggaggttggcttcagctccaggctttcctgatccgtggcatccaggatcttgtacttgcttttcctcttgggttttcctttttgcctcttacaacaacagatcacagtccaagacaggattcccaaggcaacaacaatgacaaaggtagcaatgataaca

SEQ ID NO: 8618 - DNA, 307 bp, Homo sapiens
gtcctggcagatgctctcaagagtatcaacaatgccgaaaagagaggcaaacgccaggtgcttattaggccgtgctccaaagtcatcgtccggtttctcactgtgatgatgaagcatggttacattggcgaatttgaaatcattgatgaccacagagctgggaaaattgttgtgaacctcacaggcaggctaaacaagtgtggggtgatcagccccagatttgacgtgcaactcaaagacctggaaaaatggcagaataatctgcttccatcccgccagtttggtttcattgtactgacaacctcag

SEQ ID NO: 8619 - DNA, 411 bp, Homo sapiens
ctgggcaagaaatgcctcaggaggtttttatttttcctcttcagatagatgttgcttcctgccaattgcatcctgtacccactgttccttctggattccatgatttaccatccagcagggcttttctgagtcgtctccagaagatgtgccgccccaggacactgtcctcccactccaggtaagtgttcctgctgagaaggcggtacagctccacctgctgcctgagcagggtcttctccaccttctgcaggacaatgaagatgataccagcacgactgctcagaaactgccaggtctgagcaatctcatattcaaagatacaccagcggctctggatgaagtgctgggacaccacaacaatcacctttcggcttttatggaaaccttcatggatgatgttggcagcaatgg

SEQ ID NO: 8620 - DNA, 399 bp, Homo sapiens
ccatgtctagagccagacttggactttatatcttcgccagagtatccctcttccaaaactgttttgaactgactccagctttcagtcagctcacagctcgcccccttcatttgcatataattccaacagaacctttcccaactactagaaagaatggagagagaccatctcatgaagtacaaataataaaaaatatgccccagatggcaaactttgtatacaacatgtacatgcatttgatacagactacacatcattatcatcagactttattacaactaccacctgctatggtagaagagggtgaggaagttcaaaatcaagaaacagaattggaaacagaagaagaggccatgactgttcaagctgacatcatacccagtccaacagacaccagat

SEQ ID NO: 8621 - DNA, 252 bp, Homo sapiens
ccttggccgctgccgaactgctgaagaaagaaaagatcaacatccgcgtgctggaccccttcaccatcaagcccctggacagaaaactcattctcgacagcgctcgtgccaccaagggcaggatcctcaccgtggaggaccattattatgaaggtggcattggtgaggctgtgtccagtgcagtagtgggcgagcctggcatcactgtcacccacctggcagttaaccgggtaccaagaagtgggaagccag

SEQ ID NO: 8622 - DNA, 546 bp, Homo sapiens
  unsure (480): n=A,T,C or G
  unsure (520): n=A,T,C or G
ctggtgtcaagacctgggttagaggtttgtcaaacagaggcagggcccagtcacctctttggaggggagtgatgagaaggggattttggtcacctgagagggttgagtaaacttggatcagggcacaggcttctctcaccatactcagctttttgcactcactccctagttgagcctactggcatcaagctctagatgccaaggctgggatggctgtggagcaggagctatggcccaagtagctctgagaggggaagagacctaaaacccctagcagggaaaatactgacgctaggtgtgaacatatcctctcttttcacaagagtcctgatggggctggctgagcttttgggtactcatccctactgttatagctggagaggatttgggtattgaagcagggaggggcagatcccacgaagtgactgcagatctggaataataagtaaggggtagatctgcccatagagctcactttanaccggcctatactcctacaaggaattggggtaggatcttntactcagccttgccacaatagaatgg

SEQ ID NO: 8623 - DNA, 443 bp, Homo sapiens
  unsure (8): n=A,T,C or G
agtgtaantcccaaaaattacccaaagaagaagatggaaaagcgatttgtcttcaacaagatagaaatcaataacaagctggaatttgagtctgcccagttccccaactggtacatcagcacctctcaagcagaaaacatgcccgtcttcctgggagggaccaaaggcggccaggatataactgacttcaccatgcaatttgtgtcttcctaaagagagctgtacccagagagtcctgtgctgaatgtggactcaatccctagggctggcagaaagggaacagaaaggtttttgagtacggctatagcctggactttcctgttgtctacaccaatgcccaactgcctgccttagggtagtgctaagaggatctcctgtccatcagccaggacagtcagctctctcctttcagggccaatccccagcccttttgttgagccagg

SEQ ID NO: 8624 - DNA, 252 bp, Homo sapiens
ctgcccagtgagtgtgtgaggggctggtctgtttaactgcttgccctgaaggtgcgaggagagcctgttcgccttgcatccagtgggccaagcttacatagatcccatctcctctgcataccctcagcatcctgatctataaaatgggagtgaatatagcaccttcagccacaccaccagcctgcctgcggcccctgcctcctgcccggcctcctctgaggtcagtgccttcagctcctgctgcactggtgg

SEQ ID NO: 8625 - DNA, 383 bp, Homo sapiens; identical to SEQ ID NO: 7515

SEQ ID NO: 8626 - DNA, 495 bp, Homo sapiens
  unsure (299): n=A,T,C or G
cctggccggcttgatgggactcctggagaaagggcttgggggtcccgagcttctcgatcctcttggaggaatgggggtagtctttcctttgatgctgctgtggccctagcccgggaccgccaaaggactgaggctcaaggagttcggcgaacccagacctgtactgagggtggggattactgcctcatccccagaacctccccttgtagcatgatctctgcccattctcctcggccccttagctgcctggagctcccatctgaaggtgcagaagggtctggatcccggagtcgtcttantctgccccccagagaaccccaggttcctgaccccctgttgtcctctcagcgcagatcatatgcatttgaaacacaggctaaccctgggaaaggtgaaggactgtgattaggaccacagccctgggcaaaggggaccagcaagttgtcttgaatctccagggttcctgactagctgtctcctctgcagcatgagcag

SEQ ID NO: 8627 - DNA, 569 bp, Homo sapiens
  unsure (552): n=A,T,C or G
ccatcttgagtcttggtgggcttggcaagtaaggagacattgaccagattcaaagcttccagaggtggtgagaactccagggccgagtaatggagagtacaaaggtccttcttggcccccatgacccttccaagccaagaacttggcagtagctgtgagaagcagagatagggagaggaggtgaggggcacctatagctcttagccatgagttatgactccctccatccaagggagacccaaggacatgaaaggggactcagttccaaggatcagagggaacttgggttgttttgggataatgactgtggcttgggatgtcacggagatgaacaccagaattggtgtgcaacagatgagctccagtacccctgatagtttgcatgggttttgctctgctgatgatggtcagggacagcagtgaggccctctacaatgccgccttctgcctaaacacaggcagtgcccacaaaaggggagctgtcattatggagcctaggaatggatagtcagagagcagcggctgggcagtgcaactcctgcattggacaangtcctggctagagaatg

SEQ ID NO: 8628 - DNA, 398 bp, Homo sapiens
  unsure (54): n=A,T,C or G
  unsure (156): n=A,T,C or G
  unsure (160): n=A,T,C or G
  unsure (192): n=A,T,C or G
  unsure (215): n=A,T,C or G
  unsure (222): n=A,T,C or G
  unsure (228): n=A,T,C or G
  unsure (250): n=A,T,C or G
  unsure (315): n=A,T,C or G
  unsure (330): n=A,T,C or G
  unsure (358): n=A,T,C or G
  unsure (364): n=A,T,C or G
  unsure (372): n=A,T,C or G
  unsure (392): n=A,T,C or G
tacaagcttttttttttttttttttttttttttttttagggaagtttatttcanaaccattgaacagtatgatatttgctcatttataaatattcccatttaaataatctgagcttatatattttcagtgttaattaaaggacttgatttaaaganagcncaccagtccaaattgaattgattccatagctnttaaaaactaggctcttttacanacactgntacttnttgccccctttgaataaattanaccaatgaataaaacaaacaaacaaataaataaataaatagggaagcggttgctcatcaaaatgngggagcgaatgacanagggtttcttaaaaccaaatgtggccgnggtttntgtcaggngggctttaagtgagtagganaggtga

SEQ ID NO: 8629 - DNA, 558 bp, Homo sapiens
  unsure (351): n=A,T,C or G
ccagtggaatgatgttccctgcaattaccatctcacctatacgtgcaagaaaggaacagttgcttgcggccagccccctgttgtagaaaatgccaagacctttggaaagatgaaacctcgttatgaaatcaactccctgattagataccactgcaaagatggtttcattcaacgtcaccttccaactatccggtgcttaggaaatggaagatgggctatacctaaaattacctgcatgaaccgtaagtggtcctttagaaagaatggactaccgtgctataacaactactagacaccttcattttacggctgtggtatcggcagtttagggtatggagcaagtaatattgngtgttttctttttttctttctttccttccatgtagcatctgcataccaaaggacttattctatgaaatactttaaaaattcctcatcagcaaaggacaattcaataaatacatccaaacatgatcatcgttggagccggaggtggcaggagtcgaggcgctgatccctaaaatggcgaacatgtgttttcatcatttcagccaaagt

SEQ ID NO: 8630 - DNA, 589 bp, Homo sapiens
  unsure (50): n=A,T,C or G
  unsure (231): n=A,T,C or G
ctgggaagccacgagaatattgtgaacctgctgggggcgtgcacactgtnaggaccaatttacttgatttttgaatactgttgctatggtgatcttctcaactatctaagaagtaaaagagaaaaatttcacaggacttggacagagattttcaaggaacacaatttcagtttttaccccactttccaatcacatccaaattccagcatgcctggttcaagagaagttcanatacacccggactcggatcaaatctcagggcttcatgggaattcatttcactctgaagatgaaattgaatatgaaaaccaaaaaaggctggaagaagaggaagacttgaatgtgcttacatttgaagatcttctttgctttgcatatcaagttgccaaaggaatggaatttctggaatttaagtcgtgtgttcacagagacctggccgccaggaacgtgcttgtcacccacgggaaagtggtgaagatatgtgactttggattggctcgatatatcatgagtgattccaactatgttgtcaggggcaatgcccgtctgcctgtaaaatggatggcccccgaaagcctgtttgaaggca

SEQ ID NO: 8631 - DNA, 453 bp, Homo sapiens
gtacaactagaggaaagcggaagagggttgatgtggaagaatcagaggcgagtagtagtgttagcatctctcattccgcctcagccactggaaatgtttgcatcgaagaaattgatgttgatgggaaatttatccgcttgaagaacacttctgaacaggatcaaccaatgggaggctgggagatgatcagaaaaattggagacacatcagtcagttataaatatacctcaagatatgtgctgaaggcaggccagactgttacaatttgggctgcaaacgctggtgtcacagccagccccccaactgacctcatctggaagaaccagaactcgtggggcactggcgaagatgtgaaggttatattgaaaaattctcagggagaggaggttgctcaaagaagtacagtctttaaaacaaccatacctgaagaagaggaggaggaggaagaagcag

SEQ ID NO: 8632 - DNA, 553 bp, Homo sapiens
cgagcagacacattccgaatactaaaattccttaggaaaattagtcattgcccatgtgtgatagctgttttccattttgaattttaaccattttgggaaaaggaagagaatgggaaataccagtatagtccgaaaagcccttaaaaaatgagtgcgaaaagtggaagggtggagtggacataggaagatgatgaacttgtcattttttcctttccatagcttcattttattgtgtcaaagttgcagaaagcacttcactttcatcgaggctctttttaggcagggtacagccaagaaaacttttttatggctcagatgtaaatcctagaaaacgtagtagaaatgatggcaggatctctaactgtaaaataacagtagtgttagtagtaagtgtcattataataacgttatagaactctgcacatcaaaaataccacattttatcatgatctctgcaagagatttctgttggtagtcattctagacttctaataaataatacgttgagtaggaaaggttctgtgaggatccaaataataatgaaaatgacagt

SEQ ID NO: 8633 - DNA, 356 bp, Homo sapiens
cctttcaccacaactcggatgtggatcacgcccttttgtttagctctcgccgctgcggctatgcctgctgtctgtgctgcgatgcctgtgcccttcttggcattccgaaatccctctgtgccacaggaagcaaaggcaaggggctcattactagcagagactacctggatctgtgtgttgttgtgggatgctttaatgtgtgcaattgggatctcctcaaatttctttcctgcccacctcagagagctctcctctcctgaacttggtgtggctgggagccgcgttctgttcaactttctgcttggccgcagcgtcttggagctgtcgagcgcctgtgcagatggtcccggccggcg

SEQ ID NO: 8634 - DNA, 244 bp, Homo sapiens
gctcacctcactaaccagtatatgcagagaatggcaagtgtacgagctgttcccaaccctgtaatcaacccctaccagccagcacctccttcaggttacttcatggcagctatcccacagactcagaaccgtgctgcatactatcctcctagccaaattgctcaactaagaccaagtcctcgctggactgctcagggtgccagacctcatccattccaaaatatgcccggtgctatccgcccag

SEQ ID NO: 8635 - DNA, 435 bp, Homo sapiens
  unsure (276): n=A,T,C or G
  unsure (277): n=A,T,C or G
  unsure (307): n=A,T,C or G
  unsure (308): n=A,T,C or G
  unsure (322): n=A,T,C or G
  unsure (327): n=A,T,C or G
  unsure (368): n=A,T,C or G
  unsure (375): n=A,T,C or G
  unsure (388): n=A,T,C or G
ctgaaacttatttttatattcattccataaatactgatcacatatctttttctgggtgcttagagtacattaaagaacaaaacaaagattgctgccctcttgtagcttatactctgataaggaaaaacaagcaataaatacaagtgaattttatagtatattaaatgatgatgagtgctttgaaaaaattgaaaggtagatcaggataatcggggtgggataagcattatatgtagcgggtttttttggttggttttttttttttttggtttttgnntttttgagatggagtctcgctctgttgccnnggtatagtggcacnatctnagctcactgcaacctccagctccctggttcaagtgattatnctgcctnagcctcccgagtngctgggattacaggcacatgcctccatacccagctaatttttgtatt

SEQ ID NO: 8636 - DNA, 552 bp, Homo sapiens
ctgagctttgtgaccagtgccagggtttatgaaacattatacatctaaaaaaaaaaaagtaaaaaaagaggcatttaacaataatcagacacatccacacattaaaactgatttccactgctgatttatacattatctagttgtttaaaaatcgcaatcaacatcccaacatctttttaagagtacaatgggcaaagatcaaagacagataaataataatataataaattagagcatgtaatacatcctatgggaattgctgaatcaacattattttccattggggggtatatatttttggtttatctttatcttttctgctgttattttttttctctgcttgataaaatggggctcattcctaaagccagcttgctgagacactaatttcagaagctcacttgtcacttgtttaacctctgagaatactcaggaacacatggttcccagcagcttgggctgggtctttatggaagtgaaatgcacatagatgaacacacgcactcacgtgcgcacacacaccacacacacacacagacacgcagtcacaca

SEQ ID NO: 8637 - DNA, 509 bp, Homo sapiens
  unsure (29): n=A,T,C or G
  unsure (53): n=A,T,C or G
  unsure (106): n=A,T,C or G
  unsure (142): n=A,T,C or G
  unsure (160): n=A,T,C or G
  unsure (176): n=A,T,C or G
  unsure (334): n=A,T,C or G
  unsure (370): n=A,T,C or G
  unsure (424): n=A,T,C or G
  unsure (496): n=A,T,C or G
  unsure (501): n=A,T,C or G
ccacaagctgatggttactagaactaggngtctgaagtttaaaattctacacnataaaatatctaaaaaatttgtgtcacagaatttcaatagcaattaaattcangaaaagatattcaaatgtcttaatagcaattaccanataataaaaagttattgnaaaagaaaacctttgngttacagattttcactgaattcagacttataaagaattatgcaaatgtatgtaagagtaattattgattaatagattaacagtatttaggaaaaccctatgatgtcataaaagttaatggaaactgtatacgattacagtaagtaataaaattatgtnataaatctttccatactaaaattgttgttttcaaanaagtgaacttcattgttaacattgcgggcacaaagagtttcatcttctgaccangatggacaccaattttgcatttttttctggatgaaagatttcaaacatgtcccagttttcacatcataaagntgtangttgggta

SEQ ID NO: 8638 - DNA, 515 bp, Homo sapiens
ccacaagctgatggttactagaactaggtgtctgaagtttaaaattctacacgataaaatatctaaaaaatttgtgtcacagaatttcaatagcaattaaattcaggaaaagatattcaaatgtcttaatagcaattaccagataataaaaagttattgtaaaagaaaacctttgtgttacagattttcactgaattcagacttataaagaattatgcaaatgtatgtaagagtaattattgattaatagattaacagtatttaggaaaaccctatgatgtcataaaagttaatggaaactgtatacgattacagtaagtaataaaattatgtcataaatctttccatactaaaattgttgttttcaaagaagtgaacttcattgttaacattgcgggcacaaagagtttcatcttctgaccaggatggacaccaattttgcatttttttctggatgaaagatttcaaacatgtcccagttttcacatcataaagttgtaggttgggtatcccag

SEQ ID NO: 8639 - DNA, 351 bp, Homo sapiens
  unsure (46): n=A,T,C or G
  unsure (75): n=A,T,C or G
  unsure (193): n=A,T,C or G
ctgatggttactagaactaggtgtctgaagtttaaaattctacacnataaaatatctaaaaaatttgtgtcacanaatttcaatagcaattaaattcaggaaaagatattcaaatgtcttaatagcaattaccagataataaaaagttattgtaaaagaaaacctttgtgttacagattttcactgaattcanacttataaagaattatgcaaatgtatgtaagagtaattattgattaatagattaacagtatttaggaaaaccctatgatgtcataaaagttaatggaaactgtatacgattacagtaagtaataaaattatgtcataaatctttccatactaaaattg

SEQ ID NO: 8640 - DNA, 249 bp, Homo sapiens
  unsure (8): n=A,T,C or G
  unsure (9): n=A,T,C or G
  unsure (39): n=A,T,C or G
  unsure (49): n=A,T,C or G
  unsure (54): n=A,T,C or G
  unsure (56): n=A,T,C or G
  unsure (98): n=A,T,C or G
  unsure (108): n=A,T,C or G
  unsure (114): n=A,T,C or G
  unsure (236): n=A,T,C or G
  unsure (243): n=A,T,C or G
aaaggcanngccctggtacctgacagtgtaaagaagganctcctacaangaatnanaacattccttgctcagcatgccagcctttaagattgaattanattgtgttgntgtggntttatttctgaaagtaaaacttgccataaattagaaaacaatttcccaaaataaaatccttttttgtatgatggtatacagttttcagtaatgatgtatacattgtattgatttttttcccntaaatgngttatt

SEQ ID NO: 8641 - DNA, 257 bp, Homo sapiens
  unsure (194): n=A,T,C or G
ctgggactgaaaccccgcacgcagccgccggagtttccaaactgcgatcccttctcacccaaagaaacaaggggagtatgatccatgatcaacaacatgctaaagttaaacaagaaaatggtacaaaatagaaattattaccatacatgtccagcatgcaggattaatatttttaatgcagattttttgtattnttctatataatcgagcaggcaataaaactgatgagatttgggcgccgagcgtcctaactgagg

SEQ ID NO: 8642 - DNA, 376 bp, Homo sapiens
  unsure (212): n=A,T,C or G
  unsure (232): n=A,T,C or G
  unsure (276): n=A,T,C or G
  unsure (291): n=A,T,C or G
  unsure (292): n=A,T,C or G
  unsure (340): n=A,T,C or G
  unsure (346): n=A,T,C or G
  unsure (347): n=A,T,C or G
ctttgacctatatttggtgtggcttctatcctatgaaaagggaattgagtgttttgactcgtcgtttcccacctgttgggcctgtctgtaggtataccttctaaaatcaactgacatctccattttgctacagagtagcaaaaatcaacaatttttaagcatactaatggtgtgcatttgatctgaaccttcttgatgctatcatgtttcanctgtgaatatagcctgtcanatgcttagaacaatcagttgaactggtatgagtggctgcattanggctttacaaatcgnnaggactgaattttggtgggtttagagagtgcatttttatagctgagtngaatgnnatgagttcactacaggcttttggcaaagg

SEQ ID NO: 8643 - DNA, 542 bp, Homo sapiens
  unsure (9): n=A,T,C or G
  unsure (526): n=A,T,C or G
  unsure (539): n=A,T,C or G
ttggtctanagctttataaggccattcagcgagggaccatcaagtgcaactttgcgggggttgccttgggtgattcctggatctcccctgttgattcggtgctctcctggggaccttacctgtacagcatgtctcttctcgaagacaaaggtctggcagaggtgtctaaggttgcagagcaagtactgaatgccgtaaataaggggctctacagagaggccacagagctgtgggggaaagcagaaatgatcattgaacagaacacagatggggtgaacttctataacatcttaactaaaagcactcccacgtctacaatggagtcgagtctagaattcacacagagccacctagtttgtctttgtcagcgccacgtgagacacctacaacgagatgccttaagccagctcatgaatggccccatcagaaagaagctcaaaattattcctgaggatcaatcctggggaggccaggctaccaacgtctttgtgaacatggaggaggacttcatgaagccagtcattancattgtggacganttg

SEQ ID NO: 8644 - DNA, 382 bp, Homo sapiens
  unsure (173): n=A,T,C or G
  unsure (224): n=A,T,C or G
  unsure (234): n=A,T,C or G
  unsure (256): n=A,T,C or G
  unsure (272): n=A,T,C or G
  unsure (282): n=A,T,C or G
  unsure (283): n=A,T,C or G
  unsure (297): n=A,T,C or G
  unsure (301): n=A,T,C or G
  unsure (308): n=A,T,C or G
  unsure (316): n=A,T,C or G
  unsure (326): n=A,T,C or G
  unsure (352): n=A,T,C or G
cctgaatctgatgcaccgtcttctgctcgtgccatggtttttgtttttgttttttcttaattgagtcatctttacttaaaaatgctaatttccagcttcacttgtaagatcagaatatctgaaaacactttacacttattccaaaatgactccaactggttggagctaagtanaacttagagcctatgatgattaattttatgtgttgatttgactgggctaangggtgcccanatagctgggaaaacaatatctntgggtgtgcctgtganggcgtttctnnaacaggtgttaatnagtngactgantaaagaanatccaccctnaccaatgtgaataggcctcatccagnccattgagggctcaaataaaacaaacaggc

SEQ ID NO: 8645 - DNA, 554 bp, Homo sapiens
  unsure (521): n=A,T,C or G
  unsure (522): n=A,T,C or G
  unsure (531): n=A,T,C or G
  unsure (540): n=A,T,C or G
ccaagatggttggggcataccttggttttatacattttagggagacataagacattaatcaatatatgtaagaagaacattggttcagtggggagggagcttccaggtcacagataggtgagacacaaacagttgcattcttttgagtttctgattagcctttccaaaggaggcaatcagatatgtatctatctcagtgagcagagagataactttgaatagagtgggaggtgggtttgccctaagaagtttccctaagcttgagttttccttagtgattctggggccccaagatattttcctgtcacagttgacatccccaacacagtgtttagggctcagaaaaagataccctaaaatagggtgctttggcatgctgaatgctttgaataaaggaggctgaagggcctcagaaataagagaacaaaggtctgtctctgacccactgctgcccacctcccttcccttccaaagcacagggagggattttctttgaagttctcttatttgattaagggaanntttctccanaaggaaggnaattgtcctggaca

SEQ ID NO: 8646 - DNA, 260 bp, Homo sapiens
gaggttgcggtgagctgagactgcgccattgcactccagcctgggcaacaagagcaaaactccgtctcaaaataaataaataaataaataaataaataaataaataaataaatataaataaaagtagtgggttgatacggtccaatttatttgtcagagatcaccgtggctcttgggtagagaatggatttgaagctggcctaacctagaattggacagacaaaatgggaggctgttgcagtaatctagatggtggatgg

SEQ ID NO: 8647 - DNA, 269 bp, Homo sapiens
ctggccgtctggtgctcgctggtcctgtccttctgccgcctgcacaaacagtccagcatgacggtgatggaagctcaggagagcccgctcttcaacaacgtcaagctacagcgaaagcttcctgtggagtcgatccagattgtattagaggaactgaggaagaaagggaacctcgagtggttggataagagcaagtccagcttcctgatcatgtggcggaggccagaagaatgggggaaactcatctatcagtgggtttccaggagtgg

SEQ ID NO: 8648 - DNA, 491 bp, Homo sapiens
ccaggtttaaagccatcaacaagagatggtatagatctttcattgtctgagtttgagaagagaatcaattccttgttgatgaaatcattataagtcaaatgctttgttgcagtaccatataaaaattgctctggtaagccatgtagcctacgctgtctccggtcttccataaaatttgttaaccattcttttctgtcatcaatcttcttcttactaaatgccaaggtaatggcagcatcatcttcaggaccagcatatctaaacaagatgcgatgcctttccatatcagcaaaatattcctttgcttctttagctgtactagtacccaatcctttatagtactttattttccaggctttctggttttctatatgttttttccattcgtcaaattcaggaatactgtagaaggaaagttcctgcttatttttgcttgcctttacaataggagtaatgaactcttcaagaaaaccatgcttcaaaagtgatgg

SEQ ID NO: 8649 - DNA, 397 bp, Homo sapiens
ccactgtgtagcaccttctaattcaatttcatcggcagttgtaataacagttccagcctcaggtgttttaatggtgggaaacatcttgattgcttctccagaaacttgaccataggttttgttttggaaatcttggagaatctcagttccttccacagcaataagttctgtgggagaagcttccatttcttctaataactcaggtttaccatcatcttctgaaggttctaattttgtgtcaggagataaagagggaggctcagttatgtgaaggtattcctcacttgatggtttgaaagtcgcttcaatatttacatgaatttccttaaaagaatcctgtggggacattacagatgagccgacgtctattcctggcagagcactgggctgggggatc

SEQ ID NO: 8650 - DNA, 546 bp, Homo sapiens
  unsure (452): n=A,T,C or G
  unsure (514): n=A,T,C or G
ctgggagagctagactaagttggtcatgatgcagaagctactcaaatgcagtcggcttgtcctggctcttgccctcatcctggttctggaatcctcagttcaaggttatcctacgcagagagccaggtaccaatgggtgcgctgcaatccagacagtaattctgcaaactgccttgaagaaaaaggaccaatgttcgaactacttccaggtgaatccaacaagatcccccgtctgaggactgacctttttccaaagacgagaatccaggacttgaatcgtatcttcccactttctgaggactactctggatcaggcttcggctccggctccggctctggatcaggatctgggagtggcttcctaacggaaatggaacaggattaccaactagtagacgaaagtgatgctttccatgacaaccttaggtctcttgacaggaatctgccctcanacagccaggacttgggtcaacatggattagaagaggattttatgttataaaagaggattttnccaccttgacaccaggcaatgtagttagcata

SEQ ID NO: 8651 - DNA, 386 bp, Homo sapiens
  unsure (28): n=A,T,C or G
  unsure (37): n=A,T,C or G
  unsure (91): n=A,T,C or G
  unsure (94): n=A,T,C or G
  unsure (104): n=A,T,C or G
  unsure (128): n=A,T,C or G
  unsure (182): n=A,T,C or G
  unsure (257): n=A,T,C or G
  unsure (290): n=A,T,C or G
  unsure (295): n=A,T,C or G
  unsure (320): n=A,T,C or G
  unsure (374): n=A,T,C or G
  unsure (378): n=A,T,C or G
catgatgcacaagctactcaaatgcagncggcttgtnctggctcttgccctcatcctggttctggaatcctcagttcaaggttatcctacncanagagccaggnaccaatgggtgcgctgcaatccanacagtaattctgcaaactgccttgaagaaaaaggaccaatgttcgaactacttncaggtgaatccaacaagatcccccgtctgaggactgacctttttccaaagacgagaatccaggacttgaatcgtntcttcccactttctgaggactactctggatcangcttnggctccggctccggctctggatcangatctgggagtggcttcctaacggaaatggaacaggattaccaactagtagacnaaantgatgctt

SEQ ID NO: 8652 - DNA, 488 bp, Homo sapiens
  unsure (197): n=A,T,C or G
  unsure (328): n=A,T,C or G
  unsure (335): n=A,T,C or G
  unsure (407): n=A,T,C or G
ggttggggcataccttggttttatacattttagggagacataagacattaatcaatatatgtaagaagaacattggttcagtggggagggagcttccaggtcacagataggtgagacacaaacagttgcattcttttgagtttctgattagcctttccaaaggaggcaatcagatatgtatctatctcagtgagcanagagataactttgaatagagtgggaggtgggtttgccctaagaagtttccctaagcttgagttttccttagtgattctggggccccaagatattttcctgtcacagttgacatccccaacacagtgtttanggctcanaaaaagataccctaaaatagggtgctttggcatgctgaatgctttgaataaaggaggctgaagggcctcagnaaataagagaacaaaggtctgtctctgacccactgctgcccacctcccttcccttccaaagcacagggagggattttcttt

SEQ ID NO: 8653 - DNA, 493 bp, Homo sapiens
  unsure (117): n=A,T,C or G
  unsure (158): n=A,T,C or G
  unsure (165): n=A,T,C or G
  unsure (225): n=A,T,C or G
  unsure (234): n=A,T,C or G
  unsure (252): n=A,T,C or G
  unsure (279): n=A,T,C or G
  unsure (308): n=A,T,C or G
  unsure (332): n=A,T,C or G
  unsure (386): n=A,T,C or G
  unsure (389): n=A,T,C or G
  unsure (465): n=A,T,C or G
  unsure (486): n=A,T,C or G
ccatagaaagataactgctgtaagattcagtgttggtacattcacaccccattcttttttttttttttccccatcagtcaatcttatctggtaatgggatcattactgttatccagngccaatggtctcagtagtatttccattcaaaaataatttancttttanattaaggatttctctttttgttttattaaacattgaaaggtgggactttaaaaaatggtntaaatctanattttaaggattcttttnttacaaactgtctcagctttttacaanaaatgtttaaataccaaaatgctgctcanaaaatttaaagtttaattgcccgnggttattctactgtttctatcccaatgtgtgctcctctgtactgcgtgtgtaanacnctcagttcatctgaatgtttggatgggaagttttgtgttgagcctccaggcatagcactggaccagcccaggccgntgtggcaaaacgggagggganaatggga

SEQ ID NO: 8654 - DNA, 559 bp, Homo sapiens
  unsure (546): n=A,T,C or G
cctttaaaattccattatcttaggatgtttttaaatgattactttaaatgtgattatttcctaaaccacacaagagtaaaatagagcatttattgatggaataacaaaagtgcttttcttaaatattcttcaaaatacatttgtacaacttacaataatatatccaaaataactgtatatacaaaacattacctagttttaatgtatgtgcttttttccccaaaaattacaaagtaacttcttttttttttggcaaagttcaaccttaacagaggtgacaattttaaaggttggtttaagaaaatagaacctgagggaaattgacacgcaagagtcaatgacaagcaagagatttggaggaatatttttagtttgttaaattaaaaatgttttttagagtgatacttttcacattacaaaaataaaccaaaatgaagaaaaggtcactgtaaaatgatggaaaaaggatctgtagatttgcttttagtatttcaaatagccaacaatgcatgtcagaaaatgaatgcaagatcacaacagtcttgnatttactttgtat

SEQ ID NO: 8655 - DNA, 553 bp, Homo sapiens
  unsure (436): n=A,T,C or G
  unsure (521): n=A,T,C or G
cttacatcattcttttaaaagtagtcttttattaagagtcaaaaattttatatttttgttttcgttggactaattctaaaatttaagttcctcttacggaatgttatcaaaaattatatagttatatgcttagaagtcttctattgattaagccatcaaacttaagtacatcaaaatttgtactttaaagtttaaattcttttttccttgtgaacataatcctataaactaaaattttcctggaccaagttatttttgtagtttactaatatacaattgatcaaaacaatataaagctatcgtaacatgtgaaagattatacaaattgtaaaaattttgttggaaatatgtcttaatgagatgattagggctgtttttcccaattcacatttccgtagggaaatattccttaaaactagaatgtggcatggcttancacatttcactctcattttgtttgatagatgtaaataccgagaaaatctgtttacataagtagatgaaaatgatagttttattgngcactgctactcaatttttaaaagcaatttct

SEQ ID NO: 8656 - DNA, 430 bp, Homo sapiens
  unsure (208): n=A,T,C or G
  unsure (304): n=A,T,C or G
  unsure (320): n=A,T,C or G
  unsure (368): n=A,T,C or G
  unsure (378): n=A,T,C or G
  unsure (398): n=A,T,C or G
  unsure (414): n=A,T,C or G
  unsure (418): n=A,T,C or G
ccagcgacagcctggcctgggaatggactggcagctcatcactaaaatgactcctttcatggaatccactgttatgcagccacactgaccacagagcaactgaataggtgagcattggattgttgatgacaactcttcagcagaacaattgtgtgtttgaagggactgttttatgatgaaataactgttatttcctggagctaattgntgaatgacagtttgtcaactgtttaaatgaatttcatttgaattaacaattatacagccactcagaggtcctacattcgccagagttggcatccanttgatgggttcatttnaattaaatggtttggaggctaacgtgattttttaaattgaatttcatnactattctgngtattctatttatcactatnctaaatgactcatggntggntaattgattatc

SEQ ID NO: 8657 - DNA, 309 bp, Homo sapiens
  unsure (10): n=A,T,C or G
  unsure (16): n=A,T,C or G
  unsure (30): n=A,T,C or G
  unsure (42): n=A,T,C or G
  unsure (112): n=A,T,C or G
  unsure (148): n=A,T,C or G
  unsure (165): n=A,T,C or G
  unsure (184): n=A,T,C or G
  unsure (192): n=A,T,C or G
  unsure (221): n=A,T,C or G
  unsure (237): n=A,T,C or G
  unsure (239): n=A,T,C or G
  unsure (241): n=A,T,C or G
  unsure (261): n=A,T,C or G
  unsure (271): n=A,T,C or G
  unsure (286): n=A,T,C or G
ctggaatccncagttnaaggttatcctacncagagagccagntaccaatgggtgcgctgcaatccagacagtaattctgcaaactgccttgaagaaaaaggaccaatgttcnaactacttccaggtgaatccaacaagatcccccgtntgaggactgaccttttnccaaagacgagaatccagnacttgaanacgtatcttcccactttctgaggactacntctggatcaggcttcngntncggctccggctctggatcangatctgggantggcttcctaacggnaatggaacaggattaccaactag

SEQ ID NO: 8658 - DNA, 555 bp, Homo sapiens
  unsure (456): n=A,T,C or G
  unsure (539): n=A,T,C or G
ctggtattttgcctaagatctatttaagataaccttttcttatattttttacttaatattgggcataatcgtatcattcaagattaagtctgggctatttctttgataagaactgaatgtggccgggcgcagtggctcacgcctgtaatcccagcactttgggaggccgaggtgggtggatcacaaggtcaggagatcgagaccatcctggctaacacggtgaaaccctgtctctactaaaaatacaaaaaattagccgggcgtggtggcgggcgcccgtaatcccagctactcgggaggctgaggcaggagaatggcgtgaacccgggaggtggaggttgcagtgagccgagattgcgccactgcactccagcctgggcgacagagcgagactgtctcaaaaaaaaaaaaaaaaaaaaggaacggaatgtactggagatgtatttgataaccaangttttaggtaaattttcaccagtattagttctatttgcaaactgaaaaatgttgtaggcttaatataaaataaccacattagngaacattatatctctt

SEQ ID NO: 8659 - DNA, 508 bp, Homo sapiens
gaaaagcagcttctaatgagccaataaaaaatacaggatggcaatcaccatatcttgaagaaaactctgctgtaaattgtaataaggcatctccttcattttctgcgttttctggcactaaaaaacaaacaaaagaaaaaacaaaaacaaaaaaacaaaacaaatagacacaaaaacaaaccacataacatctaatcccacatataagaaatatattcaatcaataaagaggaaataaaattaaattttagcttctgtgatatatctgaggggatagtttaactcaacatatattagatctcatcaaaccagaatcaaaaagaaccttaaaatattccaagctcataaattttgaaaaaccaatggacacaatcctgctaagcatttaaaatatgtgcccagttgtcatttaggatttcaatgttttcttgaaatagacatcttgtgactaaattatattaaatgggtctgatattattttaaagacttcattaattggggaaaataa

SEQ ID NO: 8660 - DNA, 449 bp, Homo sapiens
ctgggagagctagactaagttggtcatgatgcagaagctactcaaatgcagtcggcttgtcctggctcttgccctcatcctggttctggaatcctcagttcaagaaagacgagaatccaggacttgaatcgtatcttcccactttctgaggactactctggatcaggcttcggctccggctccggctctggatcaggatctgggagtggcttcctaacggaaatggaacaggattaccaactagtagacgaaagtgatgctttccatgacaaccttaggtctcttgacaggaatctgccctcagacagccaggacttgggtcaacatggattagaagaggattttatgttataaaagaggattttcccaccttgacaccaggcaatgtagttagcatattttatgtaccatggttatatgattaatcttgggacaaagaattttataga

SEQ ID NO: 8661 - DNA, 95 bp, Homo sapiens
  unsure (35): n=A,T,C or G
  unsure (39): n=A,T,C or G
  unsure (88): n=A,T,C or G
  unsure (92): n=A,T,C or G
actacttccaggtgaatccaacaagatcccccgtntgangactgacctttttccaaagacgagaatccaggacttgaatcgtatcttnccanttt

SEQ ID NO: 8662 - DNA, 600 bp, Homo sapiens
gttaggagttcctcatggacctcgaagatgtgtggttccccaggccattgagctccataaagagaaggttgtttgtattgctgctggactgaggcatgcagtagctgctacagcgagtggcatcgtgttccagtgggggactggtttggcatcatgtggacgacggttgtgccctgggcagactcttccattgtttttcacagcaaaggaaccaagcagagtgacaggtctagagaattctaaagcaatgtgtgttcttgctggctcagaccactcagcttcattaacagatgcaggagaggtgtatgtttggggaagcaacaagcatgggcaactggctaatgaggctgctttccttcctgtgccccagaaaatagaagcacattgtttccagaatgaaaaggtcactgccatctggagtggatggacacacctggttgctcagacagaaactggcaagatgtttacctggggccgagcagactatggtcagctagggaggaagttggagacttatgaaggctggaaactagaaaagcaagattcatttctcccctgttcaagaccaccgaacagcatgccttcatctccgcattgctt

SEQ ID NO: 8663 - DNA, 252 bp, Homo sapiens
  unsure (9): n=A,T,C or G
  unsure (15): n=A,T,C or G
  unsure (21): n=A,T,C or G
  unsure (30): n=A,T,C or G
  unsure (56): n=A,T,C or G
  unsure (59): n=A,T,C or G
  unsure (61): n=A,T,C or G
  unsure (73): n=A,T,C or G
  unsure (132): n=A,T,C or G
  unsure (146): n=A,T,C or G
  unsure (148): n=A,T,C or G
  unsure (200): n=A,T,C or G
  unsure (232): n=A,T,C or G
  unsure (240): n=A,T,C or G
gtgagctgngactgngccatngcactccancctgggcaacaagagcaaaactccgnctnanaataaataaatnaataaataaataaataaataaataaataaatataaataaaagtagtgggttgatacggnccaatttatttgtnanagatcaccgtggctcttgggtagagaatggatttgaagctggcctaacctanaattggacagacaaaatgggaggctgttgcantaatctanatggtggatggt

SEQ ID NO: 8664 - DNA, 517 bp, Homo sapiens
  unsure (467): n=A,T,C or G
ccaatgggtgcgctgcaatccagacagtaattctgcaaactgccttgaagaaaaaggaccaatgttcgaactacttccaggtgaatccaacaagatcccccgtctgaggactgacctttttccaaagacgagaatccaggacttgaatcgtatcttcccactttctgaggactactctggatcaggcttcggctccggctccggctctggatcaggatctgggagtggcttcctaacggaaatggaacaggattaccaactagtagacgaaagtgatgctttccatgacaaccttaggtctcttgacaggaatttgccctcagacagccaggacttgggtcaacatggattagaagaggattttatgttataaaagaggattttcccaccttgacaccaggcaatgtagttagcatattttatgtaccatggttatatgattaatcttgggacaaagaattttatangaaatttttaaacatctgaaaaagaagcttaagttttatcatcctttttt

SEQ ID NO: 8665 - DNA, 565 bp, Homo sapiens
caaggttatcctacgcagagagccaggtaccaatgggtgcgctgcaatccagacagtaattctgcaaactgccttgaagaaaaaggaccaatgttcgaactacttccaggtgaatccaacaagatcccccgtctgaggactgacctttttccaaagacgagaatccaggacttgaatcgtatcttcccactttctgaggactactctggatcaggcttcggctccggctccggctctggatcaggatctgggagtggcttcctaacggaaatggaacaggattaccaactagtagacgaaagtgatgctttccatgacaaccttaggtctcttgacaggaatttgccctcagacagccaggacttgggtcaacatggattagaagaggattttatgttataaaagaggattttcccaccttgacaccaggcaatgtagttagcatattttatgtaccatggttatatgattaatcttgggacaaagaattttatagaaatttttaaacatctgaaaaagaagcttaagttttatcatccttttttttctcatgaattcttaaagg

SEQ ID NO: 8666 - DNA, 399 bp, Homo sapiens
agtgaccaggcagtttttctgcctttagctttgacagttcttaattaagatcattgaagaccagctttctcataaatttctctttttgaaaaaaagaaagcatttgtactaagctcctctgtaagacaacatcttaaatcttaaaagtgttgttatcatgactggtgagagaagaaaacattttgtttttattaaatggagcattatttacaaaaagccattgttgagaattagatcccacatcgtataaatatctattaaccattctaaataaagagaactccagtgttgctatgtgcaagatcctctcttggagcttttttgcatagcaattaaaggtgtgctatttgtcagtagccatttttttgcagtgatttgaagaccaaagttgttttacag

SEQ ID NO: 8667 - DNA, 327 bp, Homo sapiens
ccatgaactctatcaagtacagtaccctgttggagagtgagaaaaatactttcatggaaatctggaagaagagatgggataagttcatagcagatgtggctacaaagtgaggagaagctagccagccctctacaagctgtcttcttgcacacgctgtcacttcctctcactcgttcttgaatcagctccatgtgcccatgaaatcaatggcctctgtatggagcgaccctgtgagaagcacttggctggctgagcaaattcatcctctggaaatattctctctcagccacagtgacattgaccctcttggttttctcctctctctgg

SEQ ID NO: 8668 - DNA, 415 bp, Homo sapiens
ctgctggctctatcttctagataacattaacgacgtacggggaggagcccaggatagcaccataaactccctgcatgagatcaatagctatggtgtgccaccctgttcactggcacgctgtgctaaatgaagggcacgatgttcacagttccgtacccacgacttcgctttttccctaaagagcgatctcatgcctgcctagagtcctaaccactcgggaggctgaggtaggaggatcacccaagcccagaaggtcgaggctgcagtgaactgtgattacgccactgtgctccagccagggtgacaaagcgagaccccgtctctatttaaattaaaagaaaaaaaaaagtaactttaacttccattatttactctacccaatgcattatctacccattagggagacatctagttt

SEQ ID NO: 8669 - DNA, 449 bp, Homo sapiens; identical to SEQ ID NO: 8036

SEQ ID NO: 8670 - DNA, 530 bp, Homo sapiens
  unsure (12): n=A,T,C or G
  unsure (110): n=A,T,C or G
accaaaaggttnacagacttggaattttgttccattatataactgagatcattatctaatccctgctctttacataaaactttatgtggttcattttatggtaaggcttnctacgaaataataaaacaatctttttctatagaatttgtggaactagtatttttattttcctgtcatgtcttgccttttctgacttctgtcatacacacaaacacacacacacacagagatacatgtgtatgtttgtttggcaacataggagggacaagcttagtttctcgtattctacgtgtcttataagatcatggtttgctatgtttacagatttatccccttctattagagtacccgaagttcttttaaaatatacaagatgttttcctactggtatgacatccctgaagtacttgtctttctttagttttattcttttagaacaagaaggaaaaaaaaacccgagaaataacctttaaagttttttaaaaattactttgtaagagatgtaagttgaatctcctctatataaagta

SEQ ID NO: 8671 - DNA, 500 bp, Homo sapiens
tctgaccatccatatccaatgttctcatttaaacattacccagcatcattgtttataatcagaaactctggtccttctgtctggtggcacttagagtcttttgtgccataatgcagcagtatggagggaggattttatggagaaatggggatagtcttcatgaccacaaataaataaaggaaaactaagctgcactgtgggttttgaaaaggttattatacttcttaacaattctttttttcagggacttttctagctgtatgactgttacttgaccttctttgaaaagcattcccaaaatgctctattttagatagtttaacattaaccaacataattttttttagatcgagtcagtataaatttctaagtcagcctctagtcgtggttcatctctttcacctgcattttatttggtgtttgtctgaagaaaggaaagaggaaagcaaatacgaattgtactatttgtaccaaatctttgggattcattggcaaataat

SEQ ID NO: 8672 - DNA, 509 bp, Homo sapiens
ctgcactgctggatgcttgcctggttcccagcctttaaggtttttagtctataagttcaacgttgttggaaaagtgctctgatacctgcagaggtgggagaaaggtgggggcagtcctctgctaggagatggaagggacaatcaaagcttagtagcttgagctggtcctggaagagcaagtaggagctctttagccagactaagagaagggcattcttggcagaaggaatattctatataaagaagtggagtcagggaacagtagggctctttgaagaactacagattgtgttctaaatgaatgacatgtaaggtttgtaaggggcgagtgataaccactgatgaatggcagatggtgttgacaactaggcggggccagagtctgtaggatcttacatgtcttgcaatcagttttgactttgaccttggaacccagttgaggctcccttccgccccagttcctcatggcagggaaatacatcatgttgtgcgttgtaagacttcaaaac

SEQ ID NO: 8673 - DNA, 331 bp, Homo sapiens
  unsure (7): n=A,T,C or G
  unsure (10): n=A,T,C or G
  unsure (34): n=A,T,C or G
  unsure (64): n=A,T,C or G
  unsure (99): n=A,T,C or G
  unsure (100): n=A,T,C or G
  unsure (170): n=A,T,C or G
  unsure (254): n=A,T,C or G
  unsure (277): n=A,T,C or G
aatcaanatntaatttttttatttgtactgaaanactaatcataactgttaattctcagccatntttgaagcttgaaagaagagtctttggtattttgnnaacgttagcagactttcctgccagtgtcagaaaatcctatttatgaatcctgtcggtattccttggtatntgaaaaaaataccaaatagtaccatacatgagttatttctaagtttgaaaagtaaaaagaaattgcatcacactaattacaaantacaagttctggaaaaaatattnttcttcattttaaaactttttaactaataatggctttgaaagaagaggcttaat

SEQ ID NO: 8674 - DNA, 243 bp, Homo sapiens
cccaaccagattcctcatagagattcctaatcactagtttcttgtattcataaactcagagatacagagggcttggtttgaagttggggtgagatgaaacctttgctctgagccaaagctctggggccttgcattccctgcattgggttgatgactgtcagcatcactgccgcaggccatgcttgactaaggtacctggttttagccacagccacctccttgtatgttacctttcagctctgg

SEQ ID NO: 8675 - DNA, 497 bp, Homo sapiens
  unsure (11): n=A,T,C or G
  unsure (23): n=A,T,C or G
  unsure (28): n=A,T,C or G
  unsure (38): n=A,T,C or G
  unsure (44): n=A,T,C or G
  unsure (94): n=A,T,C or G
  unsure (193): n=A,T,C or G
  unsure (240): n=A,T,C or G
  unsure (248): n=A,T,C or G
  unsure (254): n=A,T,C or G
  unsure (285): n=A,T,C or G
  unsure (299): n=A,T,C or G
  unsure (407): n=A,T,C or G
ccaagcctcancctttggtccantgcancccttgcctngcttgncaacagtgaaaaattagtttggttagaagaaccatctggaaacacaccancttctgctaccttcatgctcattgttaaaaaaagattaaccagtgtgaacattctgatctgttaattccagggactgttttctttccaatggactgttngttggtagaataacccccaaaagctcaaagctaaaatgcatcatcantcctagtnggcagntccttaagaatggactggcggcgtggttganctgatatggaaaanctgcaccttcctgcagaagatcaactgacctgctatcccaccccaaatttcagcctgaggtatatttcagtgaaggcaggtagctgtgcttctcagagcagagaagcngttttaagagcaaaaaggtagaggaaatctagaaaagaaccgtcttgatacagatttatcccatggtgtgaagggagggcaaagaaccca

SEQ ID NO: 8676 - DNA, 540 bp, Homo sapiens
  unsure (23): n=A,T,C or G
  unsure (24): n=A,T,C or G
  unsure (31): n=A,T,C or G
  unsure (90): n=A,T,C or G
  unsure (98): n=A,T,C or G
  unsure (104): n=A,T,C or G
  unsure (106): n=A,T,C or G
  unsure (117): n=A,T,C or G
  unsure (158): n=A,T,C or G
  unsure (171): n=A,T,C or G
  unsure (172): n=A,T,C or G
  unsure (177): n=A,T,C or G
  unsure (223): n=A,T,C or G
  unsure (261): n=A,T,C or G
  unsure (309): n=A,T,C or G
  unsure (325): n=A,T,C or G
  unsure (348): n=A,T,C or G
  unsure (365): n=A,T,C or G
  unsure (386): n=A,T,C or G
  unsure (451): n=A,T,C or G
  unsure (531): n=A,T,C or G
  unsure (536): n=A,T,C or G
gaaaagaaaaagacttaaattannacttgtngaaatgagtattacaatgactgaaatgaaaagtacactggatagggtgctgtggttcangcctgtantctcancnctttggaaggntgaggcgggcagatcccctgagtttgggagtttgagaccancctgaccaacatnngaganaccccatctctactgaaaatacaaaattacccgggtgtggtggcancatgcctgtaatctcagctactcgggaggctgaggcanaagaattgcttgaatctgggaggcggaggttgtggtgagccaagatcntgccattgcactccancctgggcaacaagagcgaaactncgtctcaaaaaattaantaaataaggcttatgtgcagntattctcaatgagctaaaaagcttcctgaggctagaaattcttgtcatttttggctgggagcagnggcttacacctgtagtttcagcattttgggaggtcgaggcgggcagatcacctgaggtcagggatttgagaccagcctgnacctnggcc

SEQ ID NO: 8677 - DNA, 406 bp, Homo sapiens
ccaattgaaacaaacagttctgagaccgttcttccaccactgattaagagtggggtggcaggtattagggataatattcatttagccttctgagctttctgggcagacttggtgaccttgccagctccagcagccttcttgtccactgctttgatgacacccaccgcaactgtctgtctcatatcacgaacagcaaagcgacccaaaggtggatagtctgagaagctctcaacacacatgggcttgccaggaaccatatcaacaatggcagcatcaccagacttcaagaatttagggccatcttccagctttttaccagaacggcgatcaatcttttccttcagctcagcaaacttgcatgcaatgtgagccgtgtggcaatccaatacaggggcatagccggcgc

SEQ ID NO: 8678 - DNA, 388 bp, Homo sapiens
  unsure (49): n=A,T,C or G
  unsure (289): n=A,T,C or G
ctgcttcaggggaaggcttgtggcttatatctattttgttgtattcctntagttcaacatgtctgcccccacccttacttctaacacctctgcccactccagtattccctcagaacctagcctggtaacgaatatatggacaattaaattacatcccaacatcattcatactttaatatataagaaatcagagcagagaatcagggcagccagtccctgaaggaagagtctgtgacaaatcacaagtatgatcacagcacgaacttttctattctagcctggcctctangaagaaaacagagagtgttaccggacttaaggggaaaaaggacatgcttgatgaaggacagaaccccattgttctccacatttcctggctcacagaagg

SEQ ID NO: 8679 - DNA, 562 bp, Homo sapiens
  unsure (518): n=A,T,C or G
  unsure (535): n=A,T,C or G
ccaatgaacacattacgtcctctgtatggtttttatcaagtaactgccccagtgctcccatgacgctgggcaggtccacttgttaggccagtgagggccatagttcgttggtaattaagtgttaacattgttacactcctttttatggttactggtgatctgatttccagaacaatttgttcactccagattatgatgatggcttttcaatgaagcatacagccaccgcccgtttccagagaaaccaccgcctcatcagtgaaattcttagtgagagtgtggtgccagacgttcggtcagttgtcacaacagctagaatgcaggtcctcaaacggcaggtccagtccttaatggttcatcaggtaaagtcataaaacattcatttcaataagatgtgcctataccacaaatcccaggtgatatgattcctacaccatgcctaaatctacctgttaaatatgtcaatctaacctgttcctgatttggagaagaggtttaaggaagtggacctttcccanatgtttaataagtttgncattaaaaactataatatagaaccttg

SEQ ID NO: 8680 - DNA, 345 bp, Homo sapiens
ccatcacagggactcacatgggagccttttaaaactccagatggtggctgagcacagtgattcatgcctgtcatcccagcactttgggaggccgaggccggtggatcacttgaggccaggagttcgagaccctcctgggcaacatggtgaacccgtctctactaaaaatacaaaaattagctgggtatggtgatacgcgcctgtaatcccagctactcaggaggctgaggcgggagaatcgcttgaacccgggaggcggaggctgcagtgagccagattgtaccacttcactccagcttgggcaacagagcaagactctgtcttggaaaaaaaaaatacagatgg

SEQ ID NO: 8681 - DNA, 562 bp, Homo sapiens
ctgggcttcattggtaagatgttcaagtcgctggacctgagcctgattgtagagttcattctcatgttctaccgggacaagcccatcgactggctcctggaccatattctgtgggtgaaagtctgcaaccccgagaaggatgcgaagcactgtgaccggcagaaagccaacctgcggatccgcttcaaaccgtccctcttccagcacgtgggcactcactcctcgctggctggcaagatccagaaactgaaggacaaagactttggaaagcaggcgctgcggaaggagcatgtgaacccgccagcagaggtgagcacgagcctgaagacataccaccacttcaccctggagaaagcctacctgcgcgaggacttcttctgggccttcacccctgccgcgggggacttcatccgcttccgcttcttccaacctctaagactggagcggttcttcttccgcagtgggaacatcgagcacccggaggacaagctcttcaacacgtctgtggaggtgctgcccttcgacaaccctcagtcagacaaggaggccctgcaggagggcc

SEQ ID NO: 8682 - DNA, 570 bp, Homo sapiens
  unsure (529): n=A,T,C or G
ctgaagggtacagccatttcatagggtcctctcagagagtatttggtttgctttcctaactttctaaaaatagtagattacacaggccacctccatctcatggctcaagaactcagaaaaggctggactatggatttaagcaatacacaggacacattttattaaagaagtcaggattattacaagttttctaaatttttttccgtttactctgtgagagaatgcaaatgatctagcggttaatggcatggaaacctcataacgctcccaaatttcagaacttcaagcatgagtcatacagttactttaacagttttaaaatatgtttttgatctattttagccacaagactgaatacaagaggactgctatctgaagggaaggattctaaatactgtacaaagaatcacatgtgtcagttataaatatatacacacacacgtaagaaacatgttttttaacataaatgcttaattacatattcaaaattgttttaatgcttaacataattattttactaacatttaanaagctactgtcctgggtatgaagctccatcataaataaatt

SEQ ID NO: 8683 - DNA, 454 bp, Homo sapiens
ccactaatgtgccatcttgagttggaaaacaagccccctccccccaaaaaaaaccctgccgctttggtgtcctatttatatatttttaaaaacattcattaaaaaaatcaaatctataataaaaatgtccctgtttgttttaaaaaagcattagtaggcatcccttatctactaaaaccatttgtttttcctaagatgcctggaagcagaaaagcgagtgagattaactcactgcgcaattaattaaaattagaattctttcctctaaacaacttccagagcaccagaaagaagaaggggccccatcaaagggagaaataaagcccttctgactcacaggagatgaaatgttcagccagagttctaacacattctggctgtcatcaaaagttctttattggattactcagaaaataactcaagtgctattttaaaaatgaaagatacaggcagc

SEQ ID NO: 8684 - DNA, 574 bp, Homo sapiens
  unsure (209): n=A,T,C or G
  unsure (216): n=A,T,C or G
  unsure (269): n=A,T,C or G
  unsure (349): n=A,T,C or G
  unsure (423): n=A,T,C or G
  unsure (424): n=A,T,C or G
  unsure (426): n=A,T,C or G
  unsure (507): n=A,T,C or G
  unsure (508): n=A,T,C or G
  unsure (530): n=A,T,C or G
  unsure (534): n=A,T,C or G
  unsure (554): n=A,T,C or G
ccaaaaaaatcaagatttaatttttttatttgtactgaaaaactaatcataactgttaattctcagccatctttgaagcttgaaagaagagtctttggtattttgtaaacgttagcagactttcctgccagtgtcagaaaatcctatttatgaatcctgtcggtattccttggtatctgaaaaaaataccaaatagtaccatacatganttatttntaagtttgaaaagtaaaaagaaattgcatcacactaattacaaaatacaagtnctggaaaaaatatttttcttcattttaaaactttttaactaataatggctttgaaagaagaggcttaatttgggggtggnaactaaaatcaaaagaaatgattgacttgaaggtctctgtttggtaagaatacatcattagcttaaataagcannanaaggttagttttaattatgtagcttctgttaatattaagtgttttttgtctgttttacctcaatttgaacagataagtttnnctgcatgctggacatgcctcanaacncatgaatagcccggtactanatcttgggaacatggatctt

SEQ ID NO: 8685 - DNA, 592 bp, Homo sapiens
  unsure (559): n=A,T,C or G
gccagatgcaatacaagattcctggttaaatttgaatttcagtaaacaatgaatagtttttcattgtaccatgaaatatccagaacatacttatatgtaaagtattatttatttgaatctacaaaaaacaacaaataatttttaaatataaggattttcctagatattgcacgggagaatatacaaatagcaaaattgaggccaagggccaagagaatatccgaactttaatttcaggaattgaatgggtttgctagaatgtgatatttgaagcatcacataaaaatgatgggacaataaattttgccataaagtcaaatttagctggaaatcctggatttttttctgttaaatctggcaaccctagtctgctagccaggatccacaagtccttgttccactgtgccttggtttctcctttatttctaagtggaaaaagtattagccaccatcttacctcacagtgatgttgtgaggacatgtggaagcactttaagttttttcatcataacataaattattttcaagtgtaacttattaacctatttattatttatgnatttatttaagcatcaaatatttgtgcaagaat

SEQ ID NO: 8686 - DNA, 348 bp, Homo sapiens
tgaaggtcagggggtgctttgaccattccaaggagctgtatatgatgccccggaccatggtggaccctgtccgggaggcccgggagggcggcctcatctccttctcaactcagagtggggcctatgtggtcactcccttccactgcaccgacctgggagtcaccatcctggtaaatagagggttcgttcccaggaagaaagtgaatcctgaaacccggcagaaaggccagattgagggagaagtggacctcattgggatggtgaggttgacagaaaccaggcagccttttgtccctgagaacaatccagaaaggaaccactggcattatcgagacctggaagctatgg

SEQ ID NO: 8687 - DNA, 580 bp, Homo sapiens
  unsure (351): n=A,T,C or G
ataaagggaagttaaaagccagcagttccagtcagccatcaagctctgaaagtggctcatttctcctcaaatctggcacaacacccctgccacctggagcagccacttctccctccaagagcacaaatggagctcccggtactgttgttgaatcagaagaagaaaaagccaaaaaattactttattgttcactatgcaaagtggctgtgaactccctgtcacagctagaggcacacaacacaggttagcagctatcttttgcatttaaataatgtttataacaaaacccaacttttcccatcagaataccatatcttttgttgttcagaccttaggtttgttccatgcttntctacttttttgattcaaaggagtgattttagaaaagtatgatcatatgactttggaactagcaagacaaaagcagtttggagatcaaacttgttctattctttattttcttaaaaacatctaatactgtccaaaactcattttgatgaagtgacaaagatgaagataaatatttatgcacagtgttcactgcaatacacttaaaagagaaaaaaaatggaaacaacct

SEQ ID NO: 8688 - DNA, 300 bp, Homo sapiens
  unsure (48): n=A,T,C or G
  unsure (49): n=A,T,C or G
  unsure (57): n=A,T,C or G
  unsure (70): n=A,T,C or G
  unsure (88): n=A,T,C or G
  unsure (89): n=A,T,C or G
  unsure (97): n=A,T,C or G
  unsure (120): n=A,T,C or G
  unsure (127): n=A,T,C or G
  unsure (129): n=A,T,C or G
  unsure (163): n=A,T,C or G
  unsure (202): n=A,T,C or G
  unsure (203): n=A,T,C or G
  unsure (213): n=A,T,C or G
  unsure (229): n=A,T,C or G
  unsure (235): n=A,T,C or G
  unsure (274): n=A,T,C or G
  unsure (287): n=A,T,C or G
ctgggactacaggcacctgccaccatgcctggctaaatttttgtattnntagtaganacagggtttcacnagtgttaaccaggatagnntcaatctnctgacctcatgatccgtctgctntggcctncnaaagtgctgcaattacaggcgtgagccactgcgnccagcccaaagtggttaatattaatatgctgagtacctnncatgtgccanacacataagatactgnatgttnctatttcatcaatggagaaacagaagtctgagtggggtnaaagaacgggctncccaatgtcacac

SEQ ID NO: 8689 - DNA, 485 bp, Homo sapiens
  unsure (17): n=A,T,C or G
  unsure (98): n=A,T,C or G
  unsure (135): n=A,T,C or G
  unsure (150): n=A,T,C or G
  unsure (164): n=A,T,C or G
  unsure (191): n=A,T,C or G
  unsure (235): n=A,T,C or G
  unsure (381): n=A,T,C or G
  unsure (414): n=A,T,C or G
  unsure (451): n=A,T,C or G
  unsure (469): n=A,T,C or G
cgccgcttgtgctgcanccatgtctctagtgatccctgaaaagttccaacatattttgcgagtactcaacaccaacatcgatgggcggcggaaaatancctttgccatcactgccattaagggtgtgggccgaanatatgctcatgtggngttgaggaaagcanacattgacctcaccaagagggcggganaactcactgaggatgaggtggaacgtgtgatcaccattatgcanaatccacgccagtacaagatcccagactggttcttgaacagacagaaggatgtaaaggatggaaaatacagccaggtcctagccaatggtctggacaacaagctccgtgaagacctggagcgactgaagaagattcgggcccatanagggctgcgtcacttctggggccttcgtgtccnaggccagcacaccaagaccactggccgccgtggccgnaccgtgggtgtgtccaanaagaaataagtctgta

SEQ ID NO: 8690 - DNA, 584 bp, Homo sapiens
cctgccctgtgacactcaatcacagttgacgtcaggatgggtacaatgtctgcaagagaaaaggggagagcagcaacagcacagtgtctgctgtcctcagtgatacaggcgggattccaccctggttctgtaggaaaacagggtcatggtctctgaactttgctttttctgcaaagaaccagatatgatctgtttaatgaggaaagtacgtagctgtggggtcaggctaactgcccatcaagtgcttttcctttgatgacaccatgttctgccttgtaacactaggacctgcaccccttgaggcaacacttccatgagtttcctttcatgcctcttagatattttttgcatctgacaggactgctgataaaagcattagggggattaatgactttatacactaatctctctgcaggcatcaaattctttcttcaggacagacacccagaattactggctcaaaaacaggaccttttaaaaaatactcttaccacaaattgccaaactgctttctgcaaaggccataccaatttccatccccaccagcagtcatgagagtgcctgtcctatcccataccttgccc

SEQ ID NO: 8691 - DNA, 641 bp, Homo sapiens
  unsure (591): n=A,T,C or G
  unsure (592): n=A,T,C or G
  unsure (605): n=A,T,C or G
ctgcacactgtatcattttcatttctctcccttgctgtcccctctgcctctgtccttgcctcccatcatatggacacactgtgcctgacacacacgctcacataatctctccctttttgtttccctagctactcatcaacctcaggtttgcaggaaaaaaacataagatgaaaagagaaaattgtgtgacagcaccataaataaaattaaagcgatataaaatgtgtaacagagaatgcacaatcaaaataacctaatattcagtgatactccattaacataaatagaccgtctcaaaactcaaagatgccaagtatctcagcaagatttactctctttagacgtaactcatgacaaggcactgggtaaaaactgtaatttgtgaatgccaaataatgacaaataacaaagtaaaatatgctaggtgcaaaaacactcttagtactgaatgaattgacaaagacaccctttatttcaataaccagccaggagaaccttccagccacggtgaagatacgaacgctcagcgagcaaacggtacttactgtgtgctgtggtccaagtaagtgattactctgtctccctcttccnntaagcgtttactnacatggttaagatattctggaaccttacaaacaaaa

SEQ ID NO: 8692 - DNA, 70 bp, Homo sapiens
  unsure (8): n=A,T,C or G
  unsure (15): n=A,T,C or G
  unsure (22): n=A,T,C or G
  unsure (23): n=A,T,C or G
  unsure (40): n=A,T,C or G
  unsure (47): n=A,T,C or G
  unsure (50): n=A,T,C or G
  unsure (62): n=A,T,C or G
  unsure (65): n=A,T,C or G
tcaggaanatcactngaccacnnaagatgaaagctgcagngagctanctntgattgcaccantgnacgcc

SEQ ID NO: 8693 - DNA, 359 bp, Homo sapiens
  unsure (241): n=A,T,C or G
taactatcacccttgtagatattacactaaattaaaacaatagtgatacaaattcccaccttaccaaaatagcaataatccaatttatttcctagtttatttaatcagattctcctaccaaccatctcctcttctattttttaaatcaattaaaataaaggcaagagaaaagctctagttttatgtatttcaaccatagcttggatgttatgttttcccttttcctatatacaaaaataanatttgctcacatctgcacttttggtttagaaaatacatctggcaatcttcagtgatagtgaaaataagaatgctaagatactagagaaccacacctaagcaccctttttgaaagcagg

SEQ ID NO: 8694 - DNA, 590 bp, Homo sapiens
  unsure (566): n=A,T,C or G
ccatatttattcattttccacacacttgaccatctactttgtataacacattctgctaaggcccagggatacaatggcaaacaagatagatgtagttccttcccttgtggcatgtcataagagaaacagatgtgcatatacacacaataaataagaaaattaataattgtattaagtggtatgaaaaaaagggggaggattgttcactcactgttacctgtgttagtatctgcaaatgcatgaatggttgaactcccatgtcagcatttttgttgccatttatttagtaccagacatagtgctggtctcacagcttaatatttggtaatgaataaattctgctagtggtatatgttgatctgaacttacaatgatgggatatagaattggcagagtggcagatgttcacaattgtctacaagtagatgtgctagacaatggaaggatgcaggccaacctctttgattacaattgagattcatgtgactattgagccctggaaatgtagcttgtccaaattgagatgtgctgtcagtataaaatacataccagattttaaagatgtnccaaaaaatgtaaactatctcaat

SEQ ID NO: 8695 - DNA, 536 bp, Homo sapiens
  unsure (14): n=A,T,C or G
  unsure (220): n=A,T,C or G
  unsure (443): n=A,T,C or G
  unsure (486): n=A,T,C or G
gcatcccatgtgcntcgatgggcaaagtatttgtagcactgcccttggaatttgtgccagccatagtcacatgtctcggtatcttgctcacaaagtgcaccaacataacttggaaggcagaggcacctgaatgtgttaaaaccatcaacacaagtggctccattacgacagggattagagtgacattcatcaaaatcaagttcacactggtctccgctgnatcctggcacacaggtgcatacgtaggaagtttcagtaggataacaggtgcctccgttaaggcacgggttcattttgcagcgatcaggtcctggtaaatagattgccgtgccttccactgactcttcattaatgccaatcaggaaatctgtttcattagaagtctccagaagggaaaatggtggtgttgcaacctcagtattaaattccacagggtttactgntgcctgatcattggaatcaagaattctcgctgccacttgctgntctgatgctgctatcgtggaatcctgccctctgattaaagctgcttgagt

SEQ ID NO: 8696 - DNA, 595 bp, Homo sapiens
  unsure (117): n=A,T,C or G
  unsure (143): n=A,T,C or G
  unsure (333): n=A,T,C or G
  unsure (343): n=A,T,C or G
  unsure (489): n=A,T,C or G
  unsure (524): n=A,T,C or G
cttttcttcctccaagtgaaggaaggaatccttagcgatgagatctactgcccccctgagactgccgtgctcttggggtcctacgctgtgcaggccaagtttggggactacaacaangaagtgcacaagtctgggtacctcanctctgagcggctgatccctcaaagagtgatggaccagcacaaacttaccagggaccagtgggaggaccggatccaggtgtggcatgcggaacaccgtgggatgctcaaagataatgctatgttggaatacctgaagattgctcaggacctggaaatgtatggaatcaactatttcgagataaaaaacaanaaaggaacanacctttggcttggagttgatgcccttggactgaatatttatgagaaagatgataagttaaccccaaagattggctttccttggagtgaaatcaggaacatctctttcaatgacaaaaagcttgtcattaaacccatcgacaagaangcacctgactttgtgttttatgccccacgtctganaatcaacaagcggatcctgcagctctgcatgggcaaccatgagttgtatatgcgccgcaggaagcctgaca

SEQ ID NO: 8697 - DNA, 234 bp, Homo sapiens
  unsure (6): n=A,T,C or G
  unsure (15): n=A,T,C or G
  unsure (25): n=A,T,C or G
  unsure (47): n=A,T,C or G
  unsure (48): n=A,T,C or G
  unsure (56): n=A,T,C or G
  unsure (106): n=A,T,C or G
  unsure (127): n=A,T,C or G
  unsure (130): n=A,T,C or G
  unsure (179): n=A,T,C or G
  unsure (191): n=A,T,C or G
  unsure (219): n=A,T,C or G
cttgcncaaatattngatgcttaantaaatacataaataataaatanngttaatangttacacttgaaaataatttatgttatgatgaaaaaacttaaagtgcttncacatgtcctcacaacatcantgngaggtaagatggtggctaatactttttccacttagaaataaaggagaanccaaggcacagnggaacaaggacttgtggatcctggctancagactatggttgcc

SEQ ID NO: 8698 - DNA, 447 bp, Homo sapiens
ccacgtgacccccacctttctgagccaaagcacttaaaacacataataaacattcaaaaccatagcacttagaatcaggaagtccttttatcgtttttcacagtataaggcacttattttttgatatcattctctttttttaaaggcaaaggaattacaagtgaacacactagtcatggcccatcagaatgatagatgcttatctacaaaaacatttcctgacttcttgctgaacctcttgcctctgggaaatactgctgtttgcttacttaaaaagtggtgagaaattaatatgattctctcttcccttttaaaaaattaaatttgtataaatataaggcgtacaagtgcagttttgttacacggatatattgcgaagtggtgaagtccaggcttttcctgcaaccaacaccagaaaagtgtacactgtacccatcaggtactttc

SEQ ID NO: 8699 - DNA, 104 bp, Homo sapiens
  unsure (13): n=A,T,C or G
  unsure (34): n=A,T,C or G
  unsure (35): n=A,T,C or G
  unsure (42): n=A,T,C or G
  unsure (45): n=A,T,C or G
  unsure (50): n=A,T,C or G
  unsure (61): n=A,T,C or G
  unsure (76): n=A,T,C or G
  unsure (79): n=A,T,C or G
  unsure (80): n=A,T,C or G
  unsure (90): n=A,T,C or G
ctgtggactccancatgtttctgataattatgcnngcaacanttntgtancctcaagtaanaccacctgtgaactngannattatctggnccaaatatgaagat

SEQ ID NO: 8700 - DNA, 622 bp, Homo sapiens
  unsure (554): n=A,T,C or G
tccttttatattcccagaagtgggtttgctggatcatatggtaattctatttttagttttttgaggaacctctataccattttccatggtggctgtactaatttacattcccagcaacggtgtagaagagttcacttttctctgcattgttgctaacactgatctttcatctatttgagaaaatgcattctagcaggtgtgaggtaatctcattgtggttttaatttgcatttccctaatggctagtgctgctgaacgttgtttgcatgaacctggtatgtcttcttttgagaagcattttcacaagccattggtgaagtatgtggctcaccaccacccatactccagccctgttcccagtcactggtacctagagggtgagagtgaggctgctcatcaacgtgttctccaagtcataagctgctgctctcccactcacgatgcttggtgattcagtgatgttttccacttaaagacagtgatagctgtatcaccacagttaatagatgtctgatgtgtcccagtcacagagataatacaaatgtgaggaaatnatgctggtgcctgaaagcattggagaccatttgtaagaatgccatttggtagttaaagtgaacatgaa

SEQ ID NO: 8701 - DNA, 470 bp, Homo sapiens
ctgccccatacctggcaggatccagagggtgggccctgatggacaccagtctatcaggtcctccctgcaagatgctacagagtccttctccctcaacacatgtttggtgagcttggcacctacatgacacccggcttggagcactcgctgttcgtttcaaagtaactctccaggagtgaacacgggatgcttcgtggggtgtaggagatgcagcagtcagcactagtagcatggaatcctgcagcatgagaaagggtcatctgaggaccaatctttctcctccagagcatgtccagaagtactggattttccaatggaagctttgacatcatgaactctgtctctgcatcttttgtgacccgggcctgggatccaagggcagtaacaagcatgaggcaggagagggcagccacggagaccttcatcctcctggtgggcaggcagggctggccgaggactcctgggctcac

SEQ ID NO: 8702 - DNA, 547 bp, Homo sapiens
  unsure (11): n=A,T,C or G
  unsure (17): n=A,T,C or G
  unsure (44): n=A,T,C or G
  unsure (179): n=A,T,C or G
  unsure (456): n=A,T,C or G
  unsure (497): n=A,T,C or G
gcaccctccgnttcctntcctaggcgacgagacccagtggctanaagttcaccatgtctattctcaagatccatgccagggagatctttgactctcgcgggaatcccactgttgaggttgatctcttcacctcaaaaggtctcttcagagctgctgtgcccagtggtgcttcaactggnatctatgaggccctagagctccgggacaatgataagactcgctatatggggaagggtgtctcaaaggctgttgagcacatcaataaaactattgcgcctgccctggttagcaagaaactgaacgtcacagaacaagagaagattgacaaactgatgatcgagatggatggaacagaaaataaatctaagtttggtgcgaacgccattctgggggtgtcccttgccgtctgcaaagctggtgccgttgagaagggggtccccctgtaccgccacatcnctgacttggctggcaactctgaagtcatcctgccagtcccngcgttcaatgtcatcaatggcggttctcatgctggcaacaagctggacct

SEQ ID NO: 8703 - DNA, 639 bp, Homo sapiens
ctgtctgtactagacaaggttaccaagtgcggaattggttaatactaacagagagatttgctccattctctttggaataacaggacatgctgtatagatacaggcagtaggtttgctctgtacccatgtgtacagcctacccatgcagggactgggattcgaggacttccaggcgcatagggtagaaccaaatgatagggtaggagcatgtgttctttagggccttgtaaggctgtttccttttgcatctggaactgactatataattgtcttcaatgaagactaattcaattttgcatatagaggagccaaagagagatttcagctctgtatttgtggtatcagtttggaaaaaaaaaatctgatactccatttgattattgtaaatatttgatcttgaatcacttgacagtgtttgtttgaattgtgtttgttttttcctttgatgggcttaaaagaaattatccaaagggagaaagagcagtatgccacttcttaaaacagaacaaaacaaaaaaagaaaattgtgctcttttctaatccaaagggtatatttgcagcatgcttgactttaccaattctgatgacatctttacggacactattatcactaagaccttgttatggcgaagtctttag

SEQ ID NO: 8704 - DNA, 586 bp, Homo sapiens
  unsure (8): n=A,T,C or G
  unsure (549): n=A,T,C or G
  unsure (560): n=A,T,C or G
  unsure (563): n=A,T,C or G
caactgancgagtatctagatgccatgatgaatgaggctccaggccccatcaatttcaccatgttcctcaccatgtttggtgagaagttaaatggcacagatcctgaagatgtcatcagaaatgcctttgcttgctttgatgaagaagcaactggcaccatacaggaagattacttgagagagctgctgacaaccatgggggatcggtttacagatgaggaagtggatgagctgtacagagaagcacctattgataaaaaggggaatttcaattacatcgagttcacacgcatcctgaaacatggagccaaagacaaagatgactgaaataacttcaaattccagccaaacgttccttgttgccactttgggtattctgagattttctcttgcatgcccttagctttacagcttttgcatttcctgttgtatttattctcagccattttgggcatatgtatctttataatcagactggaaacgggactttctattaatatcattttcagaataaaaaataggataatttaacctaccagcccttctccnccaataactgnggnctatacagagtcaatatattttt

SEQ ID NO: 8705 - DNA, 386 bp, Homo sapiens
  unsure (29): n=A,T,C or G
  unsure (36): n=A,T,C or G
cctatagaatagtgctcaagtatacggtntgctctnaaaaaaatgttagctgtggtttttattgtcttattataattagtaattctttcaaattaataatataagcttttacacacatatcataaaagttattaaaattattagagatattttgagtagtgacgctgaagaaagtaaaagtggaattcctaagtcatacttgaaagtatcaattatatttatagaagatcagtcctactttcaaccaccaagccagcaagaattgaaaaccaactggtcaacatatgtcgatgcagatggaaaaaggatacaactgtctttaaattccctaaagaaagctgagtggagagccttctggtcactgcagtccaacctatcattacgcg

SEQ ID NO: 8706 - DNA, 473 bp, Homo sapiens
ccagtggaatgatgttccctgcaattaccatctcacctatacgtgcaagaaaggaacagttgcttgcggccagccccctgttgtagaaaatgccaagacctttggaaagatgaaacctcgttatgaaatcaactccctgattagataccactgcaaagatggtttcattcaacgtcaccttccaactatccggtgcttaggaaatggaagatgggctatacctaaaattacctgcatgaacccatctgcataccaaaggacttattctatgaaatactttaaaaattcctcatcagcaaaggacaattcaataaatacatccaaacatgatcatcgttggagccggaggtggcaggagtcgaggcgctgatccctaaaatggcgaacatgtgttttcatcatttcagccaaagtcctaacttcctgtgcctttcctatcacctcgagaagtaattatcagttggtttggattt

SEQ ID NO: 8707 - DNA, 402 bp, Homo sapiens
ccaggctggtctcaaactcctggcctctagtgatctgcctgcctcggtctcccaaagtgggattacaggcatgaaccaccacgtccagccagtcattttcttaagtaggttcttcccagcctgcaaacccagtgaaagggcttattctttccccattactgtggggaaaaagtcctgtagaggctttccataggccctgtgtgactcacgtgtctatacctgaatcaactgttacaaccaagcagatgcagagactgcgtgccctctcctggagctaggagctaggtgagtcaatcctgcactttctctacaaggcttgcaaaggtgagcaagaagattccccaaagtgaaatcagggtgctgttaccaaaagaagctatgctggcaggcaaaaaacaacag

SEQ ID NO: 8708 - DNA, 481 bp, Homo sapiens
  unsure (18): n=A,T,C or G
  unsure (86): n=A,T,C or G
  unsure (93): n=A,T,C or G
  unsure (142): n=A,T,C or G
  unsure (161): n=A,T,C or G
  unsure (165): n=A,T,C or G
  unsure (173): n=A,T,C or G
  unsure (179): n=A,T,C or G
  unsure (193): n=A,T,C or G
  unsure (195): n=A,T,C or G
  unsure (213): n=A,T,C or G
  unsure (219): n=A,T,C or G
  unsure (249): n=A,T,C or G
  unsure (252): n=A,T,C or G
  unsure (258): n=A,T,C or G
  unsure (272): n=A,T,C or G
  unsure (291): n=A,T,C or G
  unsure (300): n=A,T,C or G
  unsure (306): n=A,T,C or G
  unsure (342): n=A,T,C or G
  unsure (353): n=A,T,C or G
  unsure (354): n=A,T,C or G
  unsure (405): n=A,T,C or G
  unsure (454): n=A,T,C or G
tgaggactgacctttttncaaagacgagaatccaggacttgaatcgtatcttcccactttctgaggactactctggatcaggcttnggctccngctccggctctggatcaggatctgggagtggcttcctaacggaaatggnacaggattaccaactagtngacnaaagtgangctttncatgacaaccttangnctcttgacaggaatctgncctcanacagccaggacttgggtcaacatggattanaanaggatnttatgttataaaanaggattttcccaccttganaccaggcantgtagntagcatattttatgtaccatggttatatgattaatnttgggacaaannattttatagaaatttttaaacatctgaaaaagaagcttaagttttatcatncttttttttctcatgaattcttaaaggattatgctttaatgctgttatntatcttattgttcttgaaaatacctgc

SEQ ID NO: 8709 - DNA, 589 bp, Homo sapiens
  unsure (183): n=A,T,C or G
  unsure (193): n=A,T,C or G
  unsure (194): n=A,T,C or G
  unsure (200): n=A,T,C or G
  unsure (213): n=A,T,C or G
  unsure (233): n=A,T,C or G
  unsure (246): n=A,T,C or G
  unsure (248): n=A,T,C or G
  unsure (265): n=A,T,C or G
  unsure (281): n=A,T,C or G
  unsure (289): n=A,T,C or G
  unsure (331): n=A,T,C or G
  unsure (378): n=A,T,C or G
  unsure (382): n=A,T,C or G
  unsure (386): n=A,T,C or G
  unsure (394): n=A,T,C or G
  unsure (396): n=A,T,C or G
  unsure (406): n=A,T,C or G
  unsure (440): n=A,T,C or G
  unsure (448): n=A,T,C or G
  unsure (458): n=A,T,C or G
  unsure (463): n=A,T,C or G
cctggccaacaacaccgttattgctaaagtaaataatgttgtgtgggacctggaccgccctctggaagaagattgtaccttggagcttctcaagtttgaggatgaggaagctcaggcagtgtattggcactctagtgctcacataatgggtgaagccatggaaagagtctatggtggatgttnatgctacggnncgccantagaaaatggatnctattatgacatgtacctcnaagaagggggtgngnctagcaatgatttctcntctctggaggctttgngtaagaanatcattaaagaaaaacaagcttttgaaagactggaagttaanaaagaaactttactggcaatgtttaagtacaacaagttcaaatgccngatnttgnatgaaaangngaatactccnactaccacagtctatagatgtggccctttgatanatctgtgncgggatcctnatgtnagacacacgggcaaaattaaggctttaaaaatacacaaaaattcctccacgtactgggaaggcaaagcagatatggagactctccagagaatttatggcatttcattcccagatcctaaaatgttg

SEQ ID NO: 8710 - DNA, 567 bp, Homo sapiens
  unsure (561): n=A,T,C or G
  unsure (562): n=A,T,C or G
tgggagagctagactaagttggtcatgatgcagaagctactcaaatgcagtcggcttgtcctggctcttgccctcatcctggttctggaatcctcagttcaaggttatcctacgcagagagccaggtaccaatgggtgcgctgcaatccagacagtaattctgcaaactgccttgaagaaaaaggaccaatgttcgaactacttccaggtgaatccaacaagatcccccgtctgaggactgacctttttccaaagacgagaatccaggacttgaatcgtatcttcccactttctgaggactactctggatcaggcttcggctccggctccggctctggatcaggatctgggagtggcttcctaacggaaatggaacaggattaccaactagtagacgaaagtgatgctttccatgacaaccttaggtctcttgacaggaatctgccctcagacagccaggacttgggtcaacatggattagaagaggattttatgttataaaagaggattttcccaccttgacaccaggcaatgtagttagcatattttatgtaccatggnnatatg

SEQ ID NO: 8711 - DNA, 279 bp, Homo sapiens
  unsure (42): n=A,T,C or G
  unsure (104): n=A,T,C or G
  unsure (264): n=A,T,C or G
gggcattggtgtagacaacaggaaagtccaggctatagccgnactcaaaaacctttctgttccctttctgccagccctagggattgagtccacattcagcacangactctctgggtacagctctctttaggaagacacaaattgcatggtgaagtcagttatatcctggccgcctttggtccctcccaggaagacgggcatgttttctgcttgagaggtgctgatgtaccagttggggaactgggcagactcaaattccagctngttattgatttctat

SEQ ID NO: 8712 - DNA, 477 bp, Homo sapiens
gcgcctataatcccagctactggggaggctgaggcaggagaatcacttgaacccgggggacagaggttgtagtgagccaagatcgcaccactgcactccagcctgggtcacagagtgagactccatctcaaaaaaaaaaagagagagagagagaaagaaatagaagagaagagccatcttggcagggttattttatatctgagcaaggagtttaaatgagactagtttagattgtctgctgatgcagccgtccatagcagtacccctaaaatcccaccagaatacgggtccctctaacccagtggctggaagaaccactgtctagagcaacttttcttggaactgtcccagctaccaagtcagacaccaaggtttatgccaccaggtaacacgggaatcacaggtacatgtcgctccggtcagattagttggctttggcccctcgaccctgtgcaggagctagttctcagcttgcag

SEQ ID NO: 8713 - DNA, 494 bp, Homo sapiens
ccttatttctcttgtcctttcgtacagggaggaatttgaagtagatagaaaccgacctggattactccggtctgaactcagatcacgtaggactttaatcgttgaacaaacgaacctttaatagcggctgcaccattgggatgtcctgatccaacatcgaggtcgtaaaccctattgttgatatggactctagaataggattgcgctgttatccctagggtaacttgttccgttggtcaagttattggatcaattgagtatagtagttcgctttgactggtgaagtcttagcatgtactgctcggaggttgggttctgctccgaggtcgccccaaccgaaatttttaatgcaggtttggtagtttaggacctgtgggtttgttaggtactgtttgcattaataaattaaagctccatagggtcttctcgtcttgctgtgttatgcccgcctcttcacgggcaggtcaatttcactggttaaaagtaagagacag

SEQ ID NO: 8714 - DNA, 605 bp, Homo sapiens
ccagcgacagcctggcctgggaatggactggcagctcatcactaaaatgactcctttcatggaatccactgttatgcagccacactgaccacagagcaactgaataggtgagcattggattgttgatgacaactcttcagcagaacaattgtgtgtttgaagggactgttttatgatgaaataactgttatttcctggagctaattgttgaatgacagtttgtcaactgtttaaatgaatttcatttgaattaacaattatacagccactcaggggtcctacattcgccagagttggcatccagttgatgggttcatttgaattaaatggtttggaggctaacgtgattttttaaattgaatttcatcactattctgtgtattctatttatcactattctaaatgactcatggttggctaattgattatcatgtaagcaagctatttgaagaaattgattacatatatttatatatagggggtaactaattaatgattacttgattaaattgctatgtgaactgacaactatttataaatcaatgcaatagactgttgtttgaccaaattattttactgaactgacaagtgggtttttgatttgt

SEQ ID NO: 8715 - DNA, 572 bp, Homo sapiens
cctgcctcagcctcccaagtagctgggactacaggcatatgccaccacgcccagctaatttttgtgtttttagtacagacagggtttcaccgtgttagccaggctgatcttttgatccgcccacctcagcctcccaaagtgccaggaccacaggcgtgagccactgaacttggccgggacagctatttgtaaactagctatgtgaaaataaagggccatatccttggagtctagaattctcctttcactaagttatcaaaaattatattactttgaccacacaaaggtatttatctctggttcgtgcaaacactgaatgttggaagtaccgagtgataattggaaataaaaatctccaaacgtctagtaataaaaagactgatgggctaaattgtgtatttattcatacagaagattattagcctgttaaaaaacagtgagattttgtatagcaagatcacgggtttttttaatgaaaaaaatatgcatacaggtgtgtgcacatacctatatatttacttttttccccctctcactctgtgcccaagctggagtgtagaagcacactcatg

SEQ ID NO: 8716 - DNA, 420 bp, Homo sapiens
ctgtgacgcctgaataactgtctactttatcttcactgaaccactcactctgtgtaaaggccaacagatttttaatgtggttttcatatcaaaagatcatgttgggattaacttgcctttttccccaaaaaataaactctcaggcaagcatttctttaaagctattaagggagtatatacttgagtacttattgaaatggacagtaataagcaaatgttcttataatgctacctgatttctatgaaatgtgtttgacaagccaaaattctaggatgtagaaatctggaaagttcatttcctgggattcacttctccagggattttttaaagttaatttgggaaattaacagcagttcactttattgtgagtctttgccacatttgactgaattgagctgtcatttgtacatttaaagcag

SEQ ID NO: 8717 - DNA, 594 bp, Homo sapiens
  unsure (555): n=A,T,C or G
ccatcggtgctgaaattgagcattttaaatagtacagtaggctggtatacattaggaaatggactgcactggaggcaaatagaaaactaaagaaattagataggctggaaatgcttactttctgctctcattttctttcattttgtctgctgtctttttgaatgccaatactttcatttaaaatgttttgggagcacggcaacccaaaatgactgaacggtggtccaaaaatccaaaccaactgataattacttctcgaggtgataggaaaggcacaggaagttaggactttggctgaaatgatgaaaacacatgttcgccattttagggatcagcgcctcgactcctgccacctccggctccaacgatgatcatgtttggatgtatttattgaattgtcctttgctgatgaggaatttttaaagtatttcatagaataagtcctttggtatgcagatgggttcatgcaggtaattttaggtatagcccatcttccatttcctaagcaccggatagttggaaggtgacgttgaatgaaaccatctttgcagtggnatctaatcagggagttgatttcataacgagggttcatct

SEQ ID NO: 8718 - DNA, 608 bp, Homo sapiens
  unsure (553): n=A,T,C or G
cctccggtcacggttaaagccaagctgaggcttccactgccgtccattgctggatttttcccagtcactaggtttcagtactgctgctggctttcttgctcctggaagcattacagctttaaaaatgtaatcttcagcaaactgtgggtctttaaaattaatactgactacagtgttctgtgtcagatcccttaacataggaacaggagaacatactatttgatctggaagaatggcttcttcatccaaagaaaactttccttgaatcccatgacatagttcagggggtacctccactggctctgtggaacctgtctggtacagctctaaaatgaagtcatggagtgggtgatgtttccccacaaataagacatcacctccaaggctgtttcttctggtctcttctggagtgaggtctgggtatacctcttctagggcagctcgtagccttcgctcatccacgaatggcaagagagcaacaccttgccatgcatatttcttcccattcaaatcaatagcaaaatcttcaggatagaagtcaattatactagantcaggatcactcatgagcttccgccatgatggaggtagaaaattaccacttgcag

SEQ ID NO: 8719 - DNA, 517 bp, Homo sapiens
ctgtcctggcttggatacagctctggagtggtcaaaagagcgctctgtccctaatcatcaactctgctccaaaaaggaacctgaaaaaagctctaaactcacagatccaagaagcccagacattcccattgctgtcttcgaatgggattctaaagccagggggatgatgttttagggaatccttgaaactcctacaattataaacaggtgtgcatgaagaaaatacactaccatttaatgtcccaaacgccttataaggaaggtgaaggggacctagaaagccccttaagttcgcttagcatctcagtaagtggtctgagcatggaacagagtttgggagttgaagcaggagagacctgggttacactacaggtaaagaacatgggattttgaggcaactggggattaggaggtaaaaggaaaaggtgggagggggaagagtagaaccagtgaggtgctgtgaggctggagaccctgggaggtgaagcaggcaaggaagagtcccatgtcggggtgg

SEQ ID NO: 8720 - DNA, 454 bp, Homo sapiens; identical to SEQ ID NO: 8124

SEQ ID NO: 8721 - DNA, 456 bp, Homo sapiens
ctgaaaagaggacccaaaaagaaattggagatattgctggtgttgctgatgttacaatcagacagtcctatagactgatctatcctcgagccccagatctgtttcctacagacttcaaatttgacaccccagtggacaaactaccacagctataaattgaggcagctaacgtcaaattcttgaatacaaaactttgcctgttgtacatagcctatacaaaatgctgggttgagcctttcatgaggaaaaacaaaagacatggtacgcattccagggctgaatactattgcttggcattctgtatgtatatactagtgaaacatatttaatgatttaaatttcttatcaaatttcttttgtagcaatctaggaaactgtattttggaagatatttgaaattatgtaattcttgaataaaacatttttcaaaactgaaaaaaaaaaaaaaaaaaaaaa

SEQ ID NO: 8722 - DNA, 442 bp, Homo sapiens
  unsure (124): n=A,T,C or G
  unsure (215): n=A,T,C or G
  unsure (317): n=A,T,C or G
  unsure (357): n=A,T,C or G
ctgtggccctgctcggattgagtatgcttgataggctttgggataagaagggacaaggtgcttctagccctgtctcagtccgttatcactctgctgtagaagggggacatgccacatgtattanaaggcatctgctgtaacttccagtgcaagataattcaataactgatgtcccatttcattcagagcccttattgctcttatcaaaacagaanaaggctacatttgtgggagtgttgtcatattctcaggccaactgttttgaaattcggtatctcactgagctaatctggaacaaacctctcacctcaggccanaaggggatgacctccatttgcttctctgagtagtttcctntgctgacattccaaatcccaccatcgattgtgcagcgctttggatttccttcagttctccaggtccacctggaaagtatagttgg

SEQ ID NO: 8723 - DNA, 545 bp, Homo sapiens
  unsure (458): n=A,T,C or G
cccccgtctgaggactgacctttttccaaagacgagaatccaggacttgaatcgtatcttcccactttctgaggactactctggatcaggcttcggctccggctccggctctggatcaggatctgggagtggcttcctaacggaaatggaacaggattaccaactagtagacgaaagtgatgctttccatgacaaccttaggtctcttgacaggaatctgccctcagacagccaggacttgggtcaacatggattagaagaggattttatgttataaaagaggattttcccaccttgacaccaggcaatgtagttagcatattttatgtaccatggttatatgattaatcttgggacaaagaattttatagaaatttttaaacatctgaaaaagaagcttaagttttatcatccttttttttctcatgaattcttaaaggattatgctttaatgctgntatctatcttattgttcttgaaaatacctgcattttttggtatcatgttcaaccaacatcattatgaaattaattagattcccatgg

SEQ ID NO: 8724 - DNA, 449 bp, Homo sapiens
  unsure (12): n=A,T,C or G
  unsure (39): n=A,T,C or G
  unsure (69): n=A,T,C or G
  unsure (106): n=A,T,C or G
  unsure (123): n=A,T,C or G
  unsure (131): n=A,T,C or G
  unsure (177): n=A,T,C or G
  unsure (195): n=A,T,C or G
  unsure (211): n=A,T,C or G
  unsure (235): n=A,T,C or G
  unsure (302): n=A,T,C or G
  unsure (308): n=A,T,C or G
  unsure (351): n=A,T,C or G
  unsure (402): n=A,T,C or G
  unsure (403): n=A,T,C or G
ctggagagtgtngatcccaaaaattacccaaagaagaanatggaaaagcgatttgtcttcaacaagatngaaatcaataacaagctggaatttgagtctgcccagntccccaactggtacatnagcacctntcaagcagaaaacatgcccgtcttcctgggagggaccaaaggcggncaggatataactgacttnaccatgcaatttgtgncttcctaaagagagctgtacccanagagtcctgtgctgaatgtggactcaatccctagggctggcagaaagggaacagaaaggtttttgantacggntatagcctggactttcctgttgtctacaccaatgcccaactgnctgccttagggtagtgctaagaggatctcctgtccatcagccaggacagtnngctctctcctttcagggccaatccccagcccttttgttgagccagg

SEQ ID NO: 8725 - DNA, 246 bp, Homo sapiens
gacaccgggtgtagagggcggtcgcggcgggcagtggcggcagaatgttggctaccagggtatttagcctagttggcaagcgagcaatttccacctctgtgtgtgtacgagctcatgaaagtgttgtgaagagcgaagacttttcgctcccagcttatatggatcggcgtgaccaccccttgccggaggtggcccatgtcaagcacctgtctgccagccagaaggcactgaaggagaaggagaagg

SEQ ID NO: 8726 - DNA, 568 bp, Homo sapiens
ccagtggaatgatgttccctgcaattaccatctcacctatacgtgcaagaaaggaacagtcgcttgcggccagccccctgttgtagaaaatgccaagacctttggaaagatgaaacctcgttatgaaatcaactccctgattagataccactgcaaagatggtttcattcaacgtcaccttccaactatccggtgcttaggaaatggaagatgggctatacctaaaattacctgcatgaacccatctgcataccaaaggacttattctatgaaatactttaaaaattcctcatcagcaaaggacaattcaataaatacatccaaacatgatcatcgttggagccggaggtggcaggagtcgaggcgctgatccctaaaatggcgaacatgtgttttcatcatttcagccaaagtcctaacttcctgtgcctttcctatcacctcgagaagtaattatcagttggtttggatttttggaccaccgttcagtcattttgggttgccgtgctcccaaaacattttaaatgaaagtattggcattcaaaaagacagcagacaaaatgaaaga

SEQ ID NO: 8727 - DNA, 352 bp, Homo sapiens
ggagaggtaaaaatgttgtacatcagctctcagtaaccctagaagacttatataatggtgcaacaagaaaactggctctgcaaaagaatgtgatttgtgacaaatgtgaaggtagaggaggtaagaaaggagcagtagagtgctgtcccaattgccgaggtactggaatgcaaataagaattcatcagataggacctggaatggttcagcaaattcagtctgtgtgcatggagtgccagggccatggggagcggatcagtcctaaagatagatgtaaaagctgcaacggaaggaagatagttcgagagaagaaaattttagaagttcatattgacaaaggcatgaaagatgg

SEQ ID NO: 8728 - DNA, 392 bp, Homo sapiens
ccttggatgcagatcaatgctccaataaagttcattatcagctcctcctgccttgtgacaggatgatttgattttacaaaagtccctttgaaaacaagagtaaacgcagacagcttctagagaaaagtctggtgaagcagcagttgataatagattttcttttagtgatgaaattaatcttgttttggtaatctacagcctgttagggataggtggagggatgaagtccttaaaactaaattgttcctctacgaatcttcgacctgagcctgcggagagagtagccccaaatccatctctctgctgaaaggtcgcctgttttggtaggtgtgaggacattccgaaacacggccatccacattctgatacatcgcttcttctgcatctgtcag

SEQ ID NO: 8729 - DNA, 608 bp, Homo sapiens
  unsure (563): n=A,T,C or G
gctgggagagctagactaagttggtcatgatgcagaagctactcaaatgcagtcggcttgtcctggctcttgccctcatcctggttctggaatcctcagttcaaggttatcctacgcagagagccaggtaccaatgggtgcgctgcaatccagacagtaattctgcaaactgccttgaagaaaaaggaccaatgttcgaactacttccaggtgaatccaacaagatcccccgtctgaggactgacctttttccaaagacgagaatccaggacttgaatcgtatcttcccactttctgaggactactctggatcaggcttcggctccggctccggctctggatcaggatctgggagtggcttcctaacggaaatggaacaggattaccaactagtagacgaaagtgatgctttccatgacaaccttaggtctcttgacaggaatctgccctcagacagccaggacttgggtcaacatggattagaagaggattttatgttataaaagaggattttcccaccttgacaccaggcaatgtagttagcatattttatgtaccatggntatatgattaatcttgggacaaagaattttatagaaatttttaaa

SEQ ID NO: 8730 - DNA, 600 bp, Homo sapiens
gatcacctgaggtcaggagttcaagaccagcctgaccgacatggtagaaccccgtctctattaaaaatacaaaaaattagctgggtgtggtggtgcatgcctgtaatcccagctacctgggaggctgaggtataagaattgcttgaacctgggaggtagaggttgcagtgagctgataccgtaccattgcactccagcctgatcaaccagagcgaaaatccatcaaaaaagaaaaaaaaaggaaggaaggaagggagggagggaaagaaggaaagaaggaaggaaggaaggaagaaaaaagtggggcaaggcagcaagaagatgctgacttgttttcagcaatcatcagttatgattacttctcttcttttaccaaaaacttggacctccagcttcctgtaaacctttatcccagctcttactggtagacatgcagtgaagccagagggaataacaagtacccagcacttgaaaaacactttcagtcaagcatggtggcacatctgtagtccccgctacttgggaggctgaggtaggacgatcacttgagcccagagttcgaggctgcgatgagctatgattgcacctgtgaatagccat

SEQ ID NO: 8731 - DNA, 604 bp, Homo sapiens
ctgcacatggattggttaacataatatatactgctatataatcttttaagggctaatatttgtagataatttaaaagcatgtcaatttcctctaagatttgattatttaacctgcacaaaggccaatcttcagttatcaatgacaagaaaactctagggctgccaaaataacttcattttagaccccagagttagtgttaggctggtaatgtttctaatttgggaataatgagactagaaagctaggagggccccctccaaatttctcccttgtattaggctgaagtagaacataacgtggcttaaagcataaacttaaagcatatgctttgagttttaaaaatgttaacctgtaattaattattagagtattatccatagtctactatgatagtcagttaatattctctaaatcagattatattcatttgaaaatgcatctgcatatttgcaaatgtgttattacacaagatcttacctatgtcaatttaaagaggttaaagatgcaggaagcccccactaaaatgtaaacacatttgtacggttttcagaatgtttggactcattctttcccattgacagagcagtaggttttaattagagt

SEQ ID NO: 8732 - DNA, 604 bp, Homo sapiens
cctagatcattcatattgtacattgacatttttacataaatggaattaatactacttaccatttgagtaaagaacacaaggaattgaagagtctgtgaaaatatgtcctgtttgtgaaaggtgaaactgtccaatccatgtccaatcaatgtcagtcgtccagtattggtggtgattattaaacttattggaggtacaactttacctccaataagcttacctttacaagcttctgctttccctgcttcatctctgttatgggctatcagtccagcttggtgtgaaaatgagactatatctataccacagcccccaatcctttcaaaggctttgcatgtatttcagctacaagtgacaaggatattaaggatttaaaaggataagagagtgggaaagatgtataaggaagtgcctttgtcaaaaggcagcaaaaagtataatgatataaacataatatgaaataagcaaattttagaatactttgaaacagatttatagaggaatacatagtaaatagttatagacacacatttggggcatttttaataaggttagcaagaagaaatttgcatgagtaatgagcaatgtgaaatgggcattatac

SEQ ID NO: 8733 - DNA, 563 bp, Homo sapiens
ctgcgcaaggagtcccagaaagaccgcaagaacccgctgccccccagcgttggcgtggttgacaagaaagaggagacgcagccgcccgtggcgcttaagaaagaaggaataagacgagttggaagaagacctgatcaacaacttcagggtgaagggaaaataattgatagaagaccagaaaggcgaccacctcgtgaacgaagattcgaaaagccacttgaagaaaagggtgaaggaggcgaattttcagttgatagaccgattattgaccgacctattcgaggtcgtggtggtcttggaagaggtcgagggggccgtggacgtggaatgggccgaggagatggatttgattctcgtggcaaacgtgaatttgataggcatagtggaagtgatagatcttctttttcacattacagtggcctgaagcacgaggacaaacgtggaggtagcggatctcacaactggggaactgtcaaagacgaattaactgacttggatcaatcaaatgtgactgaggaaacacctgaaggtgaagaacatcatccagtggcagacactgaaaa

SEQ ID NO: 8734 - DNA, 600 bp, Homo sapiens
ctggctccagggatggtacaacagatgcagtctgtgtgctctgattgtaatggagaaggagaggtaattaatgaaaaagaccgctgtaaaaaatgtgaagggaagaaggtgattaaagaagtcaagattcttgaagtccacgtagacaaaggcatgaaacatggacagagaattacattcactggggaagcagaccaggccccaggagtggaacccggagacattgttcttttgctacaggagaaagaacatgaggtatttcagagagatgggaatgatttgcacatgacatataaaataggacttgttgaagctctatgtggatttcagttcacatttaagcaccttgatggacgtcagattgtggtgaaatacccccctggcaaagtaattgaaccagggtgtgttcgtgtagttcgaggtgaagggatgccgcagtatcgtaatccctttgaaaaaggtgatctttacataaagtttgatgtgcagtttcctgaaaacaactggatcaacccagacaagctttctgaactagaagatcttctgccatctagaccggaagttcctaacataattggagaaacagaggaggtagagctt

SEQ ID NO: 8735 - DNA, 594 bp, Homo sapiens
cctacctgcaagaggaattgaagattaaacgttctctcttcaactaccatgacacgaggatccatgcctgcctctactttattgcccctactggacattcactaaagtccctggatctggtcaccatgaaaaagctggacagtaaggtgaacatcattccaataattgcaaaagctgacaccattgccaagaatgaactgcacaaattcaagagtaagatcatgagtgaactggtcagcaatggggtccagatatatcagtttcccactgatgaagaaacggtggcagagattaacgcaacaatgagtgtccatctcccatttgcagtggttgacagcaccgaagaggtgaagattggcaacaagatggcaaaggccaggcagtacccctggggtgtggtgcaggttgagaatgaaaatcattgcgattttgtgaaacttcgagagatgctgatccgcgtgaacatggaggacttgcgagagcagactcacacccgccactatgaattgtaccgacgctgtaagcttgaagagatggggttcaaggacactgaccctgacagcaaacccttcagtcttcaggagacatatgaag

SEQ ID NO: 8736 - DNA, 600 bp, Homo sapiens
cttgtaactatcaaaatgaatagttcatttttgatagatttgttgtgcagccattatgaattaaatggtttattaggagtttgactaaatttttatttttagtgtgtatagcatgaatactaccaaaggagacgacaaacttgcagcttaaaatgggcaccagttcccacactggcttaatttatataactgcttggctgtattgcgggtaataatattagaagcaagaagcacttcatttttaaaagagatgttactataatattgcttaaatgctttagcacttggacttcttgagatgcagatgtgtgatttggagtgctggcttatttaaaggtcaagccaaggagtttgtggttcagccacaactactgttttctaagactattgatgtgaaggacttagtgaagtaatttttatattctgggcttcccagcaagatgtcctttttatgactgccatgcttcttttggactcagtaaatatttgtaatgttagaaaagtctcattatttttataaaatgcatgacattttaagtatgtgttgcataaaatggattatagcagttctcatggtttaggatttttaagaaatagtcc

SEQ ID NO: 8737 - DNA, 329 bp, Homo sapiens
  unsure (6): n=A,T,C or G
  unsure (7): n=A,T,C or G
  unsure (41): n=A,T,C or G
  unsure (44): n=A,T,C or G
  unsure (45): n=A,T,C or G
  unsure (56): n=A,T,C or G
  unsure (63): n=A,T,C or G
  unsure (67): n=A,T,C or G
  unsure (68): n=A,T,C or G
  unsure (304): n=A,T,C or G
gcccannacctctgcaaggtctgctcgttactatgcatgangtnngctatgatggnggcacanctgnngctgataccaatgaagtgacacatgtggcgtaagaagggaagaatctgggcttccggggaatcttctatccggatgtgcagaagcttgtcagcatcgcctgcaaaaaagggccctgtatccatggagacattgacatgggctttgattttcaagtccttctgaatcttggggtcacaggcttgactgaaattgccaacgaagaccttccctggcacgatttcaatggggtatggcntgaaatgcatccagttcctgaggca

SEQ ID NO: 8738 - DNA, 607 bp, Homo sapiens
ctgataatttacaatgtcataaagtttccagtttcacaatacaaaaaggataaaatgaaattgggtatcattttgttgcaatttatagaactttacccatacctgtaagaccctcaatgtatatgaaatcattttcactgggaaagtgacagttacagtaaaagcagaaccacacaaatctttatttaaaagccgaaatatcagccttctctctctcttttgctatttgaaaggtagtcttcaatttggcaggcaactgcttctctctccaaatagtaacaggttacaaacatgctactttaaatatgaataggacctaaggctttagtattttaaatcttgcccaatacagaaatgcctttcaagagactttagtgatgcttaatttatgaacaacaaggaattattttccttttgattattcactttttcaaaactcatagatcagaataaacaaaaaatcccccaacccatggtggggacacaaaagtaacataagtgactaaggtgtgccattcatagagaggttgaagactccatgccccaggaccacttagctgcaatagggtgaaatagtctactttttgatttcatgaatttttttcta

SEQ ID NO: 8739 - DNA, 279 bp, Homo sapiens
  unsure (58): n=A,T,C or G
  unsure (66): n=A,T,C or G
  unsure (79): n=A,T,C or G
  unsure (119): n=A,T,C or G
  unsure (131): n=A,T,C or G
  unsure (202): n=A,T,C or G
  unsure (222): n=A,T,C or G
  unsure (234): n=A,T,C or G
  unsure (243): n=A,T,C or G
  unsure (267): n=A,T,C or G
tttttttttttttttttttttttactcataaaaaacattttactttaattatagggtncaaataanagtcttaacacanaaatcctacctcctatttaagatataaatacttgatgatntaatcaatcaanagggattaattaatgtcagttgaaaatctaatgacttaaatccataaatgccatttgcttttgtctggaanatttaaactgatttaagggngacacacagcanagttctagnggacattcgtgttaaccgtttggngctcaaaatgga

SEQ ID NO: 8740 - DNA, 605 bp, Homo sapiens
ctgtggctgtctgtcagagaagcacatttttctgcagataattagaatggcttcccccatctctcacggactgtcccaagtctagaaaagaattgagttcctcttctattagtcaaataaaagggaagagaatgtttgtcttcctttcctttctgtagtgttaagaaaataaacgaacttaatgattctaaattatcagtgagcttaacactgtactatagaccaaagattaccttttcaaaaagtcctttgaggtgaaatattttgtatacgtaatacatagatgcacatataaacacacacatatagaatctcaatattttaacacttctttgggtagttgtactaactcactaaccctgaggaaaaagttaagaaattgaaagtgttttcttcaaaagttgagatttaacaataaaaggtgttactttgataactaaaaggaactttattatcctcttcctaaaataaaccaatgcctattctgaaaatggcacttgcaattacaatttgccattatcaaagctaccactgaggtagaggcattatctaaaacaaataccacttatcatttattggcagttacctcgagagagacccataca

SEQ ID NO: 8741 - DNA, 596 bp, Homo sapiens
  unsure (562): n=A,T,C or G
ctgggagagctagactaagttggtcatgatgcagaagctactcaaatgcagtcggcttgtcctggctcttgccctcatcctggttctggaatcctcagttcaaggttatcctacgcagagagccaggtaccaatgggtgcgctgcaatccagacagtaattctgcaaactgccttgaagaaaaaggaccaatgttcgaactacttccaggtgaatccaacaagatcccccgtctgaggactgacctttttccaaagacgagaatccaggacttgaatcgtatcttcccactttctgaggactactctggatcaggcttcggctccggctccggctctggatcaggatctgggagtggcttcctaacggaaatggaacaggattaccaactagtagacgaaagtgatgctttccatgacaaccttaggtctcttgacaggaatctgccctcagacagccaggacttgggtcaacatggattagaagaggattttatgttataaaagaggattttcccaccttgacaccaggcaatgtagttagcatattttatgtaccatggntatatgattaatcttgggacaaagaattttatag

SEQ ID NO: 8742 - DNA, 596 bp, Homo sapiens
ctgaaagtttttgaaacaaatatttgaaaaccaggtatccacacatagcacttttattcctgactagttttgcacacttgaaaattgtttacttattttacaactgttttactgatgctatctttattgtttttgccgtattctgacatgtcaaatctatgccttgaattatatcatctcttttcctgtgggtttcatttgttaaattcattggattttaataatataaaagtatagctaattgttcagttttaactatttttaattatcttcttaacaaataagaagttgctttaaacattaaccaattttctatatttagctatacagagtaattgaacttaacatgtttttgtcaacaccaattacattttcagcttttaaaaatggtagcttttgtgaaatagaatcagtgaccagtatagcacttagatcccttctaactcatataatttttctcagccaatccattcacaagcttggcattgacatgtgctgctagtttataaactggcattgacgaaaatcatttgaatctcttctgctgagataatttgccaatgcaaaatacagttgtcattaatcctgcacattag

SEQ ID NO: 8743 - DNA, 601 bp, Homo sapiens
cctgtttgattgtagctatgttggtgtatctcgtgtacaagatggaaaagtgcttttgttgttctacctgatccagttgggggagcaggaatagggggtgcctgcctaacggcctctagcccatgtgcttatactgggatctgtcccgagggatctgcacctggttggcagtcattttgtggtggacgtggtaaatcgcgagtgttaccatgatgacgaggcccaagatgagccccaaaatcaggggcaaggtttcttccagttgctcccgctcatccactgggcatttatgctcttcactgaagacaaaatctgagataatgtcaaaaggttggatgtggaccgcagacaggatcatggtgaccgtcttctgcggatcactagaggccagtgaaatggtttgttgagcttgacactcataggacttcccagcgggggtgaccaaggcagagaggtggtgcgagttggctgtgtgcttcccagcactgactgcgtctttgaagtgggttttctccgaggagtcgtagacaaactgcactttgctcagcctccaagtcgcctcaggtcccttggacatgttgtggctttcctttacaaagag

SEQ ID NO: 8744 - DNA, 488 bp, Homo sapiens
cctactatgggtgttaaattttttactctctctacaaggttttttcctagtgtccaaagagctgttcctctttggactaacagttaaatttacaaggggatttagagggttctgtgggcaaatttaaagttgaactaagattctatcttggacaaccagctatcaccaggctcggtaggtttgtcgcctctacctataaatcttcccactattttgctacatagacgggtgtgctcttttagctgttcttaggtagctcgtctggtttcgggggtcttagctttggctctccttgcaaagttatttctagttaattcattatgcagaaggtataggggttagtccttgctatattatgcttggttataatttttcatctttcccttgcggtactatatctattgcgccaggtttcaatttctatcgcctatactttatttgggtaaatggtttggctaaggttgtctggtagtaaggtggagtgggtt

SEQ ID NO: 8745 - DNA, 383 bp, Homo sapiens
ctgtagagtgggcttatcatctttcaacacgcaggacaggtacagattcttttccttgaggcccaaggccacaggtattttgtcattactttcttctccttgtacaaaggacatggagaacaccacttgttgctccatatcctgtccctggaggtggagagctttcagttcatatggaccagacatcaccaagcttttttgctgtgagtcccggagcgtgcagttcagtgatcgtacaggtgcatcgtgcacataagcctcgttatcccatgtgtcgaagaagataggttcttcttcaaagatgaagggaaagaaggtgctcaggtcattctcctggaaggtctgtgggcagggaaccagcatcttcctcagcttgtccatgg

SEQ ID NO: 8746 - DNA, 368 bp, Homo sapiens; identical to SEQ ID NO: 8376

SEQ ID NO: 8747 - DNA, 605 bp, Homo sapiens
  unsure (11): n=A,T,C or G
  unsure (19): n=A,T,C or G
  unsure (512): n=A,T,C or G
  unsure (532): n=A,T,C or G
cctctacaacnctgaatgnggaatattttaaatgtaatctaaggaataaccactagggtgtggtaagtgaatatcagagtaaggctcatggagaacatggagtacttcctaaatcataattttattataaaatgacggaattactagttgtaattactgaatagcctatattgctatttattgtgtgtttcatcactttaggggtctagtatggtggatgttagtaattatctaagtgaatgaagaagcactccagtggaaagttcttatatgccattatgttcttttcctggcccagtgcctaagtgaagtaggtgtttataacttaacctaaacgtactaagatttcagatcaataaagttattaaaataaaattggtaccagccaattttcaaataaggttgctttttattttttaagtaaaattatgtttataattaaaccataagacaaatagtattttttttaaaaaagaaaagaatgtagttttattaataatttactgcattgntctcattctcaatttactgnggaccattagaaacttgtgtatagtctggcagtggaaaccatcagtgtttggaaatgaatggttgaaaaggct

SEQ ID NO: 8748 - DNA, 308 bp, Homo sapiens
ccagtttaggccggaaaagaatcatccattgcagatcagagcctttgctaaattgctgaataagaagatggttgagtcacctccttcgcttaaacttgtcctcattggaggttgtcgtaacaaagatgatgaacttagggtaaaccaactgagaaggctgtctgaggatttaggagttcaagaatatgtggaatttaaaataaacattccatttgatgaattaaagaattatttgtctgaagcaacaattggtctgcataccatgtggaacgagcattttgggattggagttgtggagtgtatggcag

SEQ ID NO: 8749 - DNA, 306 bp, Homo sapiens
aggttcggccttaacatagatcgatggttgacaatccagagtggtgaacagccctacaagatggctggtcgatgccatgcttttgaaaaagaatggatagaatgtgcacatggaatcggttatactcgggcagagaaagagtgcaagatagaatatgatgatttcgtagagtgtttgcttcggcagaaaacgatgagacgtgcaggtaccatcaggaagcagcgggataagctgataaaggaaggaaagtacacccctccacctcaccacattggcaagggggagcctcggccctgaacagagcag

SEQ ID NO: 8750 - DNA, 125 bp, Homo sapiens
ctggggccccatcatcatgggctgagagctccatgtctgtggggagctccttggcaacaggctgcagtaggacaggatgtgcttcatcgtctatttgggcttcctcagcgtcacccatggtacag

SEQ ID NO: 8751 - DNA, 193 bp, Homo sapiens
gttacacgcgggttcaacatgcgtatcgaaaagtgttatttctgttcggggcccatctatcctggacacggcatgatgttcgtccgcaacgattgcaaggtgttcagattttgcaaatctaaatgtcataaaaactttaaaaagaagcgcaatcctcgcaaagttaggtggaccaaagcattccggaaagcag

SEQ ID NO: 8752 - DNA, 604 bp, Homo sapiens
  unsure (475): n=A,T,C or G
  unsure (556): n=A,T,C or G
ggcaggtgtggtgccttggctaagtccacagacttctgagaggcccacgctttcttcttctccagaaataaaccctgaaactcaagcagctttaatcagagggcaggattccacgatagcagcatcagaacagcaagtggcagcgagaattcttgattccaatgatcaggcaacagtaaaccctgtggaatttaatactgaggttgcaacaccaccattttcccttctggagacttctaatgaaacagatttcctgattggcattaatgaagagtcagtggaaggcacggcaatctatttaccaggacctgatcgctgcaaaatgaacccgtgccttaacggaggcacctgttatcctactgaaacttcctacgtatgcacctgtgtgccaggatacagcggagaccagtgtgaacttgattttgatgaatgtcactctaatccctgtcgtaatggagccacttgtgttgatggntttaacacattcaggtgcctctgccttccaagttatgttggtgcactttgtgagcaagataccgagacatgtgactatggntggcacaaattccaagggcagtgctacaaatactttgcccatcgacgc

SEQ ID NO: 8753 - DNA, 126 bp, Homo sapiens
ccacacccaggagggttgattggcaggctggaagacaaaagtctcccaataaaggcacttttacctcaaagagggggtgggagttggtctgctgggaatgttgttgttggggtggggaggagttat

SEQ ID NO: 8754 - DNA, 494 bp, Homo sapiens; identical to SEQ ID NO: 8713

SEQ ID NO: 8755 - DNA, 597 bp, Homo sapiens
ccatcggtgctgaaattgagcattttaaatagtacagtaggctggtatacattaggaaatggactgcactggaggcaaatagaaaactaaagaaattagataggctggaaatgcttactttctgctctcattttctttcattttgtctgctgtctttttgaatgccaatactttcatttaaaatgttttgggagcacggcaacccaaaatgactgaacggtggtccaaaaatccaaaccaactgataattacttctcgaggtgataggaaaggcacaggaagttaggactttggctgaaatgatgaaaacacatgttcgccattttagggatcagcgcctcgactcctgccacctccggctccaacgatgatcatgtttggatgtatttattgaattgtcctttgctgatgaggaatttttaaagtatttcatagaataagtcctttggtatgcagatgctacatggaaggaaagaaagaaaaaaagaaaacacacaatattacttgctccataccctaaactgccgataccacagccgtaaaatgaaggtgtctagtagttgttatagcacggtagtccattctttctaaaggacc

SEQ ID NO: 8756 - DNA, 589 bp, Homo sapiens
cgcgtgcataaaaactggttctacaaatttttacttgaagtaccaggccgtttgctttttcaggttgttttgttttatagtattaagtgaaattttaaatgcacagttctatttgctatctgaactaattcatttattaagtatatttgtaaaagctaaggctcgagttaaaacaatgaagtgttttacaatgatttgtaaaggactatttataactaatatggttttgttttcaatgaattaagaaagattaaatatatctttgtaaattattttatgtcatagtttaattggtctaccaagtaagacatctcaaatacagtagtataatgtatgaattttgtaagtataagaaattttattagacattctcttactttttgtaaatgctgtaaatatttcataaattaacaaagtgtcactccataaaaagaaaactaatactaatagcctaaaagattttgtgaaatttcatgaaaactttttaatggcaataatgactaaagacctgctgtaataaatgtattaactgaaacctaacactgtttcagggctgtgagtgtgcatgtgttggaaatgtgcatggtgg

SEQ ID NO: 8757 - DNA, 603 bp, Homo sapiens
ccacagaacagtccctttttgagtaaagcagcaaggttgcttaatgacatgctatgtggttaacaagattcaactgccacatcaaggactttaaataatttcaagattttaaatgtatttatgaaatgaactcattacagcagctaatcaatgcaaactttgtcctttttctttgtctttctaagagaaactgaatttaatttaaatttaaattacagtgtctaaaacttggtaaaatattttaaatttgaataagaggaaaaaaaaaacatgaatttatttatgatggagcttcatacccaggacagtagcttcttaaatgttagtaaaataattatgttaagcattaaaacaattttgaatatgtaattaagcatttatgttaaaaaacatgtttcttacgtgtgtgtgtatatatttataactgacacatgtgattctttgtacagtatttagaatccttcccttcagatagcagtcctcttgtattcagtcttgtggctaaaatagatcaaaaacatattttaaaactgttaaagtaactgtatgactcatgcttgaagttctgaaatttgggagcgttatgaggtttccatgccatta

SEQ ID NO: 8758 - DNA, 591 bp, Homo sapiens
  unsure (589): n=A,T,C or G
cgcgtggatggatacagagcggcttctacacggcgccatcaacattctctttatgaacgtgagtggattctccaggcaaactatgcactatttcatggtcggaaagaatcaaaggaagtttaaatgagggtggagttaaactgtgctaaattacagtagtgcttattagtaactagatttcaaaaggttacagaaaatttacattctctacacaaaaactgcatctcctgcacagacaacatcgacatcgacacaggaaggaaactgattgtccattctttgcccaggaagtctcggtactttatagattcgtctttacctcttttttgttgttgttcttccgaaaaagcagtttaaatttttttctttttctttttatgctagggacgtggagatgttaaaacgacaacaaaaaatatatatataaaaacaggaatgaaatctgtgagagaatatttttggttctaaagacgggtgcatccgtttgtcttcgcccgaatcccttgctggagaccacacgagcagtgacattgcacggagagggcagctttgggttccgccgccgtcactgaaaccaccggaaggcggntc

SEQ ID NO: 8759 - DNA, 559 bp, Homo sapiens
  unsure (346): n=A,T,C or G
  unsure (547): n=A,T,C or G
gtgcgctgcaatccagacagtaattctgcaaactgccttgaagaaaaaggaccaatgttcgaactacttccaggtgaatccaacaagatcccccgtctgaggactgacctttttccaaagacgagaatccaggacttgaatcgtatcttcccactttctgaggactactctggatcaggcttcggctccggctccggctctggatcaggatctgggagtggcttcctaacggaaatggaacaggattaccaactagtagacgaaagtgatgctttccatgacaaccttaggtctcttgacaggaatctgccctcagacagccaggacttgggtcaacatggattanaagaggattttatgttataaaagaggattttcccaccttgacaccaggcaatgtagttagcatattttatgtaccatggttatatgattaatcttgggacaaagaattttatagaaatttttaaacatctgaaaaagaagcttaagttttatcatccttttttttctcatgaattcttaaaggattatgctttaatgctgntatctatcttat

SEQ ID NO: 8760 - DNA, 343 bp, Homo sapiens; identical to SEQ ID NO: 4922

SEQ ID NO: 8761 - DNA, 549 bp, Homo sapiens
  unsure (530): n=A,T,C or G
ccttaagcatttgctaaacaggttcaagtaagtttagtaaagtttcattactgccattgattcaattatcaaactgcttttgtacatataaagaattcttcagatgcatggtttctattaacaagatccaatgccttccttttatttccccttcagttcaacatctaatatataaagattgctctgactactacgcaataggcaaaagaagcagtgagacctacagagttacacctgatcccaaaaatagtagctttgaagtttactgtgacatggagaccatggggggaggctggacagtgctgcaggcacgtctcgatgggagcaccaacttcaccagaacatggcaagactacaaagcaggctttggaaacctcagaagggaattttggctggggaacgataaaattcatcttctgaccaagagtaaggaaatgattctgagaatagatcttgaagactttaatggtgtcgaactatatgccttgtatgatcagttttatgtggctaatgagtttctcaaatatcgnttacacgttggtaactata

SEQ ID NO: 8762 - DNA, 440 bp, Homo sapiens
cctgagctgtcatgcccaagggagacccagagacccaaattttcagtaaaaacttggaagagactctgattttgtttagaatagtggggggtggggacgaaatggggatgaggttgccagggtggagtgagacagcatcttggccctgggagtgtgggaaatttatgagtccttagatgaacagttaacaaaagttatgatgctaatggaaggcatcatagcttatttataagatgatacttaaacacttatgtgacatttaccatgtgctttggaggaggcacttttgttatcagccccatttccacagataagaaaactgaagcccagagaaataggtaagtggccccagcttacacagcttgcaagttgcggagccagggctggagctccaaaagcgctgcttggggtccacgcacttacctgttacttggcccagc

SEQ ID NO: 8763 - DNA, 159 bp, Homo sapiens; identical to SEQ ID NO: 7615

SEQ ID NO: 8764 - DNA, 332 bp, Homo sapiens
cctcagagtctgagtatagcctactccaattaagctagagttgttgacttttgcagaaatggaagcagtgggatccaactgatatttagctgcaatgccaaaacgagtgcagttggtacctgatgtccaagcaaggtttactgaagtgtcaagatcttcacaaactttctgataaattgatcctccaaattctgtcccatcattgacattagtgtgtagctggaagtccccagtcctgtagcccactgcaaagttattccttgtcagctttgatttggcactgtcaaaggtcatctggtagccagcaagccagccctcataaccaaagacag

SEQ ID NO: 8765 - DNA, 174 bp, Homo sapiens
cctggctcaacaaaagggctggggattggccctgaaaggagagagctgactgtcctggctgatggacaggagatcctcttagcactaccctaaggcaggcagttgggcattggtgtagacaacaggaaagtccaggctatagccgtactcaaaaacctttctgttccctttctg

SEQ ID NO: 8766 - DNA, 600 bp, Homo sapiens
ctggcaatgacaagactgggagtatcaaactaggattgttagttcaattaaaatttcagataaacaataatgtacttatactaaaaaattatttgttgtttatctgaaatgaaaatttaactgggtacccaattgtttgtttgtttaatctaaaaaccctgattgaaatttatctaataaaacatcatttaatatctaaaataaaataaatttactataacatctttataactattcaatcaatgattcatcttctatttttccaaattcttgcacaaatatttgatgcttaaataaatacataaataataaataggttaataagttacacttgaaaataatttatgttatgatgaaaaaacttaaagtgcttccacatgtcctcacaacatcactgtgaggtaagatggtggctaatactttttccacttagaaataaaggagaaaccaaggcacagtggaacaaggacttgtggatcctggctagcagactagggttgccagatttaacagaaaaaaatccaggatttccagctaaatttgactttatggcaaaatttattgtcccatcatttttatgtgatgcttcaaatatcacat

SEQ ID NO: 8767 - DNA, 600 bp, Homo sapiens
  unsure (587): n=A,T,C or G
ctgaggtggcagatagtgagcgctggtggcggagttaaagtcaaagcaggagagtaattatgaatagcgcagcgggattctcacacctagaccgtcgcgagcgggttctcaagttaggggagagtttcgagaagcagccgcgctgcgccttccacactgtgcgctatgacttcaaacctgcttctattgacacttcttctgaaggataccttgaggttggcgaaggtgaacaggtgaccataactctgccaaatatagaaggttcaactccaccagtaactgttttcaaaggttcaaaaaaaccttacttaaaagaatgcattttgattattaaccatgatactggagaatgtcggctagaaaaactcagcagcaacatcactgtaaaaaaaacaagagttgaaggaagcagtaaaattcagtatcgtaaagaacaacagcaacaacaaatgtggaattcagccaggactcccaatcttgtaaaacattctccatctgaagataagatgtccccagcatctccaatagatgatatcgaaagagaactgaaggcagaagctagtctaatggaccagatgagtagttgngatagttcatcag

SEQ ID NO: 8768 - DNA, 602 bp, Homo sapiens
  unsure (442): n=A,T,C or G
  unsure (489): n=A,T,C or G
  unsure (494): n=A,T,C or G
ccattgcaaagaaagcttctgtgaacattgctcctatgtcttttggtggacacatgcttccatttctccagggcagatacctaggagtggggttgctggtgtttggtgtgagtagtgtctgtttaggtttataaataacctgcccaactcttttccaactgtaccattttgcatttccaccagcagtgtgaacattccagtgtccccacccctctacccttgccagcacttggtgatgtcagtcttttctttttattgattctagtgagtatggagtggtattctgttgtagttttgacttgcatttcccaagactaatgacactgagcgctttttcatgtgcttacttgtcattcgtagtatcttctttggatagacaccttcatacattctaatttcactggcaaacgattatcccaaaatggattaatttatgactggngtctattatatcacataatgctgtgttaagtcttagggatgaaaganaaggnctgtgtgtacttctttttttctccccaaaaccacttattgagatggctagtgagataaaggtcatgttaagcagggcacagcagagttggaggagatggacaggaatg

SEQ ID NO: 8769 - DNA, 607 bp, Homo sapiens
  unsure (553): n=A,T,C or G
tcctactccgatgacaagttttatgcaactaatgacactgaggtcgcccagagcaattttgaggcccttcaagatttcttccgcctctttccggagtacaagaacaacaaacttttcctgaccggggagagctatgctggcatctacatccccaccctggccgtgctggtcatgcaggatcccagcatgaaccttcaggggctggctgtgggcaatggactctcctcctatgagcagaatgacaactccctggtctactttgcctactaccatggccttctggggaacaggctttggtcttctctccagacccactgctgctctcaaaacaagtgtaacttctatgacaacaaagacctggaatgcgtgaccaatcttcaggaagtggcccgcatcgtgggcaactctggcctcaacatctacaatctctatgccccgtgtgctggaggggtgcccagccattttaggtatgagaaggacactgttgtggtccaggatttgggcaacatcttcactcgcctgccactcaagcggatgtggcatcaggcactgntgcgctcaggggataaagtgcgcatggaccccccctgcaccaacacaacagacc

SEQ ID NO: 8770 - DNA, 537 bp, Homo sapiens
ctgttagggctgaatcttctggagaaaaaggtgccatctcaggagaatagcttttactctggtaggaatgcttccgagacaccacaaggcagcctgaacactcagttgcagggtcgggcttgcggtgggtgacccagagccaccaaagtcacatccacaactaatgagggaaatctgtaaagccagttagatagaagaattttatttttctgtgggttttgtgttgtcttttttatgttaaaaagaaatccagtttgtgtttttctatagaaaaagtaaaagatcaggttatactttaggttaggggttctatttattcctgttagtaaataaaattaacaaatttctttgtttaacaaaagattaatctttaaaccactaaaatacatagactgattgattattcaacacattggaattgatgtcggtcatagtttcctgaagcatttagttacaacctgaaggaataaaatgatttgtggaaatgcttaaaatagacctaactgaatacagtctcatcttgccgcgcctggctta

SEQ ID NO: 8771 - DNA, 229 bp, Homo sapiens
  unsure (20): n=A,T,C or G
  unsure (26): n=A,T,C or G
  unsure (31): n=A,T,C or G
  unsure (80): n=A,T,C or G
  unsure (138): n=A,T,C or G
  unsure (222): n=A,T,C or G
catatatttcgggtttatcnaagcancttcnccagggacgtgaaggaattcgccaaaatgctacgcttatcctatccctnggagctccaggtgtccgctggctgtgaggtgcaccctgggaacgcctcaaataacttnttccatgtagcatttcaaggaaaagatatcctgagtttccaaggaacttcttgggagccaacccaagaggccccactttgggtnaacttgg

SEQ ID NO: 8772 - DNA, 516 bp, Homo sapiens
ctgctaataatgcttatactatatttgtagcttaactagatgttaaactatggaactgttggtgccaatctgcttataaaggcaatgctctggagacaaagtcttctcacaaacagtgggcaagcaggtttcattattatgtgttcaacaacaatcctcagttcattaaataaggtccgacaatatgggtttcttcgagacgaatatcgaagggtaagaaatctatagtatataaaaggttggagcaaacttccttgaccactaaaaagcataaaaactgtcgcaggcatcaggaatatttcattgcaagcaatgaatttcagaatattttgttgattagcacttaatttgtccaagacagatctcagcagaggtaaactatttgagccccttgcgtcaaggacctttttcgtatatgtggcagcatgaagcaaagagaataacaagactgggaagatactcattgtaactggataggaatttacaaagatgagtgaatacaacaggtagtggcag

SEQ ID NO: 8773 - DNA, 450 bp, Homo sapiens
ctgtgttgtcgggcatggacgcctggtcagtgttccgctccttcttgaagacgatgttgccgagctgaagaacccctgagatgacccgcagcaggcccatttgctcctcttctgggatgcccataatcctcatggcctccatggtctcctggaacatgtccttgtcctgctgcccggggatggtgacgtgtccattggacaggaagcggtatttgttgtacggctccaacaggagatcggtcttcaggtgctctccagccccagacaggagataatagaagatgtggaaggtccgttcttccttggcttggcggatagcacgagatttctccaaaagataagtctcaatgttggctccaacaatgtagccattgacatcaaagttgatgcgaatgaatttgccgaagcgggaggagttgtcattcttcacggtcttggcgttcccgaagg

SEQ ID NO: 8774 - DNA, 601 bp, Homo sapiens
catcggtgctgaaattgagcattttaaatagtacagtaggctggtatacattagggaatggactgcactggaggcaaatagaaaactaaagaaattagataggctggaaatgcttactttctgctctcattttctttcattttgtctgctgtctttttgaatgccaatactttcatttaaaatgttttgggagcacggcaacccaaaatgactgaacggtggtccaaaaatccaaaccaactgataattacttctcgaggtgataggaaaggcacaggaagttaggactttggctgaaatgatgaaaacacatgttcgccattttagggatcagcgcctcgactcctgccacctccggctccaacgatgatcatgtttggatgtatttattgaattgtcctttgctgatgaggaatttttaaagtatttcatagaataagtcctttggtatgcagatgctacatggaaggaaagaaagaaaaaaagaaaacacacaatattacttgctccataccctaaactgccgataccacagccgtaaaatgaagggtctagtagttgttatagcacggtagtccattctttctaaaggaccacttac

SEQ ID NO: 8775 - DNA, 462 bp, Homo sapiens
gtcggagtggtctctggtagaacccaaggacttctgggtactgagaagcagcagcagaatgaggccaaatgcagagatgaggctaaggcaagaatatgccccaactaaagcatagattccccaaagtgaggctcatggtgggaggccactcaccttcctagctgctgctcgaaaaggttttgactgtgttggggtgggggttgggtaagggaatggtcaagactgagaaaggaatgaaatccattcaggaaatatcgacagggctacacgtgatgtccccaaactgctgctattgaagaacttcccaaaacttctttacaaagccctaaaggaaagtttgcatctatgaaaagccaataggctgagacatccaattgctgcatggaaattgatgtacattcaggggacggcaaaaatagctgtaaaatagtgaaaaagagcagtggttgtgctcttttctgg

SEQ ID NO: 8776 - DNA, 549 bp, Homo sapiens
  unsure (535): n=A,T,C or G
ccactaaagcatagtacgtagatgtcagtgagacagcatgagagccagcagtcatcaaagcgttccacgtttgaagttagcaactgcttaaagttatgccctattaaaattgctttctcaaaagtttgggttagtttcaaatgtgatattttggagggaaggtaaagtaggtatctttcaggtcgtgataatgagctcctatgaaaggatgcaatataatgacccgcttttctagaaagttcataatcagctctggaacaagcacacttgattcctcactgtgcttcagaatgagattaagatcagatgttggaacgtgctatgctgtagcgtgtctggaaacaaagtacacaaacctggctacggtgatgagttagcttctgcttactacctgtgacaacccaagtgggtgacactagtgaaccttctccagtctgcaggctggcatagaaggctcttagattatattgggcagcttgcaatctgccgaagcagtgacttgcatttccacacttggcttgagcactcaacccanaaggcgaagatagc

SEQ ID NO: 8777 - DNA, 408 bp, Homo sapiens
gtaggactttaatcgttgaacaaacgaacctttaatagcggctgcaccatcgggatgtcctgatccaacatcgaggtcgtaaaccctattgttgatatggactctagaataggattgcgctgttatccctagggtaacttgttccgttggtcaagttattggatcaattgagtatagtagttcgctttgactggtgaagtcttagcatgtactgctcggaggttgggttctgctccgaggtcgccccaaccgaaatttttaatgcaggtttggtagtttaggacctgtgggtttgttaggtactgtttgcattaataaattaaagctccatagggtcttctcgtcttgctgtgtcatgcccgcctcttcacgggcaggtcaatttcactggttaaaagtaagagacag

SEQ ID NO: 8778 - DNA, 382 bp, Homo sapiens
  unsure (215): n=A,T,C or G
  unsure (235): n=A,T,C or G
cctctctcacctctcctactcacttaaagcccgcctgacagaaaccacggccacatttggttctaagaaaccctctgtcattcgctcccacattctgatgagcaaccgcttccctatttatttatttatttgtttgtttgttttattcattggtctaatttattcaaagggggcaagaagtagcagtgtctgtaaaagagcctagtttttaatanctatggaatcaattcaattnggactggtgtgctctctttaaatcaagtcctttaattaagactgaaaatatataagctcagattatttaaatgggaatatttataaatgagcaaatatcatactgttcaatggttctgaaataaacttcactgaagtaaaaaaaaaa

SEQ ID NO: 8779 - DNA, 483 bp, Homo sapiens
  unsure (45): n=A,T,C or G
  unsure (162): n=A,T,C or G
  unsure (168): n=A,T,C or G
  unsure (231): n=A,T,C or G
  unsure (262): n=A,T,C or G
  unsure (333): n=A,T,C or G
  unsure (370): n=A,T,C or G
  unsure (473): n=A,T,C or G
ttttttttttttttttttttttgtacaaaaatatatttatttggngtaatagttacaaaatattcatttccacaataatattttagcaatgcattggaatgttaaaaaaaattctttgtattaatgattcttgcaaagaccctcaaaacatcccaggggtanaactgnggttcaagaggaaaagcaatttccccaagtctctgtatctaaaaaacactagtaccatgaaanataaacttaaaacatcaataacttaaataanaattaacattacttaaggcataatgtttcacatcaacaaacaaaattcattataataaaataaaacaaggngtctggggaaagctaggggaaaataagttagctgcanattcttgggttgtggagtgagtgttcaagtcttcggagtttgggtttgcttgtccaggtggtccatggaatcctgaacccacttctgcttggggtcagcacanatctccttgg

SEQ ID NO: 8780 - DNA, 369 bp, Homo sapiens
ccactgttgctgagaagagatgggtgatgggttcatatctaaatattaatcaagcctgatttcttgctctcaaattaaactgaggttacttgcctatttggtgcaatatcatcaccctaccacgtgataagcaacaaagtttaaatttatacgctaataatgccaaaagaaaatgttgataatttttatgtattagtggaaatcttttcaaccaattctggtcacttattttgggcaaattatatatatgtgtgtttgtgcattcatatgcaggctaacattcttgcattttcatgttttgcattttaagagactagttggaaaatgctgacctgacctagattttctgaatgataaatgctgccccac

SEQ ID NO: 8781 - DNA, 205 bp, Homo sapiens
  unsure (63): n=A,T,C or G
  unsure (69): n=A,T,C or G
  unsure (81): n=A,T,C or G
  unsure (93): n=A,T,C or G
  unsure (95): n=A,T,C or G
  unsure (108): n=A,T,C or G
  unsure (124): n=A,T,C or G
  unsure (128): n=A,T,C or G
  unsure (135): n=A,T,C or G
  unsure (145): n=A,T,C or G
  unsure (164): n=A,T,C or G
  unsure (199): n=A,T,C or G
  unsure (202): n=A,T,C or G
cttttttttttttttttttttttttttttttggaaaatttgcttttatttacacgtttgagtnaattanatgcatgttttntttttgaggagngnttagcaaaatgcnttaaaattttaaaatngcanttaaatntacaaaaatntagcttacaaaaaactgcnaatgtttaaaaatattctgctgcaaaatttttagngtncaa

SEQ ID NO: 8782 - DNA, 606 bp, Homo sapiens
  unsure (599): n=A,T,C or G
ctgtcccggttatgccggaatcgttgcaggtgagtccatcagaaacaggagctgacaacctgctgggcacccgaagaccaagccccctgccagctcaccgtgcccagcctcctgcatcccctcgaagagcctggccttgctatggatgcgcttaatcaccatggaggccagcaatacccatctcagcatggctttgatattctctacttcctggcctttaaaaatgacctataatttttcagtttgctttactatattttataaagaaaattctatcttatggttgattgagcattgagacttatgaaggcattaggatagatagctcaggaatgtaaaggttcagaaaaggtctgttttctcagattaacaaatatgatggattccatggctgaccttggtgcttaaaccaggaggtttcaatctagtcctagagttgtgtccctctgaaaggcccaatgccatgtaactaactttaaactggatatatactttgagccttacttaattcacagataagttgacttaactcagtatttttatttcaattaatgaaaacagtcctcttttcaaccccaggttgcttacattttgctggnctcccca

SEQ ID NO: 8783 - DNA, 264 bp, Homo sapiens
agaagcagttgcctgccaaattgaagactacctttcaaatagcaaaagagagagagaaggctgatatttcggcttttaaataaagatttgtgtggttctgcttttactgtaactgtcactttcccagtgaaaatgatttcatatacattgagggtcttacaggtatgggtaaagttctataaattgcaacaaaatgatacccaatttcattttatcctttttgtattgtgaaactggaaactttatgacattgtaaattatcag

SEQ ID NO: 8784 - DNA, 706 bp, Homo sapiens
  unsure (1): n=A,T,C or G
  unsure (6): n=A,T,C or G
  unsure (12): n=A,T,C or G
  unsure (676): n=A,T,C or G
  unsure (690): n=A,T,C or G
ncgacncactanagggcgaattgggccctctagatgcatgctcgagcggccgcccgggcaggtagaaattctatgtggtttcctaatgaagtttctagcagttgtgatgtcttcaaattctcatttaagattttatttagagttaagtcacatgagagatactttcaatgttgtcatctcaatacaaacctgcatacggcatttcactaaatccaggggaaccacagcagtgtgtgtcagaccacaacttaagaccccaccaaagccacacagtgcataatacttcgcggagccaaattcacaactgtactctgtagtaagagaagacacaccatgcattttaatataaaactcatgttactggtcataaacttacctcctggacagttaggtttccacacagcttgttagatgactatatcttataacttaacagtcagtcatgcttcaatatgctctagtccagcatgcaaaacaaacctgcattctgcatttaaccagatctagaggaaccaatgctgtatgtgttgtgccacagctaataattcctccaagtccacaaaggataaagaatctgccagatccatagtcacagctatactgctctgtttgattggaaaaaaaaaaatcaagtaagtatttcttcagagatgactaaggccactggaatgaaagnaaatgtttccctgngagatactattatcac

SEQ ID NO: 8785 - DNA, 536 bp, Homo sapiens
ctgcaacacatgctaaggcacttttattatataaaaaagggggtagggtgggagtttcactcactcctttgtgacagcaactgggacctgaattcagagctttgtaggcatatgcagcttttatatcacttcatgatttgagagtttgtttcctttaaaaaaaaaaaatgccttcttgccgtaagtctcaatgcagcatatacaaaacagttaggaatacaagtaaattcggcaaccagtgtagaccagtgaggacgagctactctcttctaaacaaaggcagtgagaaagactcggaattttatcatttattacaagaaaggggaaaaaagaaaaccttattttgctttcaaaaatacctgtgcaggtggcagatttttaaactatactgagtcaacggtgcaggtaaaccaccctcgggcccagtcctagagtagacacaagatcgcctgggagggccgctggcccctctaacgctctggctgtcagacttgggacaagtcccttaaccattaaatatatttggtcccccaaga

SEQ ID NO: 8786 - DNA, 604 bp, Homo sapiens
  unsure (566): n=A,T,C or G
ccactgtgtagcaccttctaattcaatttcatcggcagttgtaataacagttccagcctcaggtgttttaatggtgggaaacatcttgattgcttctccagaaacttgaccatcggttttgttttggaaatcttggagaatctcagttccttccacagcaataagttctgtgggagaagcttccatttcttctaataactcaggtttaccatcatcttctgaaggttctaattttgtgtcaggagataaagagggaggctcagttatgtgaaggtattcctcacttgatggtttgaaagtcgcttcaatatttacatgaatttccttaaaagaatcctgtggggacattacagatgagccgacgtctattcctggcagagcactgggctgggggatctctgtgtgtccagaggcttcactgcctgagtagatagtgaggggagatgatggtgtctgagaagacaacttcgcaaatgttgaaactgctaatgttgtatcagtgtaatatgggggattggatccttccatcacatcaggcacctctgttacactctgatccataaggngggtagtagcaatacttagatagggagtatggtctact

SEQ ID NO: 8787 - DNA, 356 bp, Homo sapiens
ctgctgaggactcgatagcggtgccgcttgcctgccaatttgcccttgacgatctgggagccagagagaggcacatgccgcccattgaagctacagagagaaacagggagggcagaggcttaagtggaacaggagagggaaggttttttgattttttttttgtttttttttgagagagtcttgctctgttgcctaggctggagtgcagtggcatgatctcggctcactgcaatgtccacctcctgggttcaagcgattctcctgcctcagcctctcaagtagctgggattacaggcacctgccaccacgcccagccaatttttgtatttttagtagagacaatttcactatgttgg

SEQ ID NO: 8788 - DNA, 281 bp, Homo sapiens
  unsure (24): n=A,T,C or G
  unsure (27): n=A,T,C or G
  unsure (56): n=A,T,C or G
  unsure (85): n=A,T,C or G
  unsure (90): n=A,T,C or G
  unsure (97): n=A,T,C or G
  unsure (102): n=A,T,C or G
  unsure (140): n=A,T,C or G
  unsure (154): n=A,T,C or G
  unsure (164): n=A,T,C or G
  unsure (196): n=A,T,C or G
  unsure (198): n=A,T,C or G
  unsure (211): n=A,T,C or G
  unsure (240): n=A,T,C or G
  unsure (248): n=A,T,C or G
  unsure (255): n=A,T,C or G
  unsure (265): n=A,T,C or G
tttttttttttttttttttttttnganattcatattttatttacaagtaaatgaanactgtccctgtaaactctaatttgggatntgaanaacaatntaaanaagtagttgctggtgccacagtgatgtgtgaaggagtntatgccactgtttntttaaacagngattttgttattaaaaaaaaaacccacctacncnatttcttcatgtngcatatgtaaaataattaaaaataaaagngacttttnaaaactntacagtctgngatcaaatgcgtgagg

SEQ ID NO: 8789 - DNA, 580 bp, Homo sapiens
gggagtacacagaactctactttctgctcaatttttctgaaaatctagaattgctcttaaaagagctcttgagtatctatctaggagtggaactgctggatacagataatgcaaaccagttttctatatagttatgtaagaatctgaggctggacacagtgcctcacacctgtcattccagcactttggaaggcagaggcaggaggatcacttgagcccagaagtttgagattagcctgggaaacatggggagaccccaactctacaaaaatagtaaaatattagctgagcatggtggtgtgtgcctgttgtctgagctacttgggaggctgaggtggggaggatcgcttgagcctaggaggtcaaggttaccgtgagctatgattgtgtcactacagcctgtgtgacacagcaagaccctgtctcataaacaaacaaataaactaattaaggaaggagatatagtgaagaggacaggagccattgtggacgttccagttggtgaggagctgttgggtcgtgtagttgatgcccttggtaatgctattgatggaaagggtccaattggttccaagacgcg

SEQ ID NO: 8790 - DNA, 601 bp, Homo sapiens
ccaaaattttaaattacaacagattgttcaatttgatggatctctcagtaaacttcagtttgaaacaacaaaaaaatactgtttactaaaacataaaaaatgtttccaagaaattatcatccaatttgaaaaataaaaaatgtaacccatagtaagtaagaaaaatacaagagaaaatcaaactttgttggaatcaagagaataccatgaacttaaaaacttcctaaatcagtagcatatcctgtattaccatgtgtagaaaactgtaattaattaatgtaaggtagtttttattagttgcataacctaaaaatacaaggaaattttggaatatacctctaaaaagaccacgaaattgtcactgaaatacacatttcttgagacaatgggcaaacttcccatttatgggaaatatcttctttttttcacacagtgaaacagagaaaaattatatcaaatgagaaatatttttctctaaaataatcttcttaaatacctcaataatgcaatacttgggaaatgtaaattttcaaaactcagacttgaaataggttattattaaacaaatatacataaatcttattgcttggcacgatttttc

SEQ ID NO: 8791 - DNA, 601 bp, Homo sapiens
  unsure (546): n=A,T,C or G
ccattctaaagttggtgagtttgtcaagcaactatcgacttgatcagttcagccaagcaactgacaaatcaaaaacccacttgtcagttcagtaaaataatttggtcaaacaacagtctattgcattgatttataaatagttgtcagttcacatagcaatttaatcaagtaatcattaattagttaccccctatatataaatatatgtaatcaatttcttcaaatagcttgcttacatgataatcaattagccaaccatgagtcatttagaatagtgataaatagaatacacagaatagtgatgaaattcaatttaaaaaatcacgttagcctccaaaccatttaattcaaatgaacccatcaactggatgccaactctggcgaatgtaggacctctgagtggctgtataattgttaattcaaatgaaattcatttaaacagttgacaaactgtcattcaacaattagctccaggaaataacagttatttcatcataaaacagtcccttcaaacacacaattgttctgctgaagagttgtcatcancaatccaatgctcacctattcagttgctctgtggtcagtgtggctgcataacagt

SEQ ID NO: 8792 - DNA, 545 bp, Homo sapiens
  unsure (442): n=A,T,C or G
  unsure (502): n=A,T,C or G
ctctgataaaacagactttaaaccaacaaagatcaaaagagacaaagaaggccattacataatggtaaagggatcaattcaacaagaagagctaagtatcctaaatatatatgcacccaatacaggagcacccagattcataaagcaagtccttagtgacctacaaagagacttagactcccacaaaataataatgggagactttaacaccccactgtcaacattagacagatcaacgagactgaaagtcaacaaggatacccaggaattgaactcagctctgcaccaagtggacctaataaacatctacagaactctccaccccaaataaagaggatatacatttttttcagcacaccacacctattccaaaattgaccacatatttggaaataaagcactcctcagcaaatgtaaaagaacagaaattataacaaactgnctctcagaccacagtgcaatcaaactagaactcaggattaagaaactcactcaaaactgntcaactacatggaaactgaacaacctgcttcctaagtgactac

SEQ ID NO: 8793 - DNA, 603 bp, Homo sapiens
  unsure (484): n=A,T,C or G
cctggttctggaatcctcagttcaaggttatcctacgcagagagccaggtaccaatgggtgcgctgcaatccagacagtaattctgcaaactgccttgaagaaaaaggaccaatgttcgaactacttccaggtgaatccaacaagatcccccgtctgaggactgacctttttccaaagacgagaatccaggacttgaatcgtatcttcccactttctgaggactactctggatcaggcttcggctccggctccggctctggatcaggatctgggagtggcttcctaacggaaatggaacaggattaccaactagtagacgaaagtgatgctttccatgacaaccttaggtctcttgacaggaatctgccctcagacagccaggacttgggtcaacatggattagaagaggattttatgttataaaagaggattttcccaccttgacaccaggcaatgtagttagcatattttatgtaccatggntatatgattaatcttgggacaaagaattttatagaaatttttaaacatctgaaaaagaagcttaagttttatcatccttttttttctcatgaattcttaaaggattatgctttaatgct

SEQ ID NO: 8794 - DNA, 360 bp, Homo sapiens
cgcaatgcctatgtctggagtcagaaagatggtgtttggaagccaaccctggtgatcctgagaattaatcgcgcagctacttttgtgaagtggtcccccctagagaacaaatttgctgtgggaagtggagcacgactcatttctgtttgttactttgagtctgaaaatgactggtgggtgagcaagcacattaaaaagccgattcgctccacagtcctcagcttggattggcatcccaacaacgttttgctggcagcaggatcatgtgacttcaaatgcagagtgttttctgcctacattaaagaagtggatgaaaagccagccagcacgccctggggcagcaagatgccttttgggcag

SEQ ID NO: 8795 - DNA, 447 bp, Homo sapiens
  unsure (10): n=A,T,C or G
gtccaggggnaattgagggaggctctaagctaggggcactgcatggtgggacaggatggccccttgaggactgaaccctggggagaagacaaacagtaataataaaaacaaataacaagtactttaagaatggattgtatgacctatagtgacagatgacatcactaatactgaaagctttttatattaataattttggcaaaatgtcattttgtaatatagtatatgctttccaggtgtgggggtggtaaagtaatgaggccaaaatcatcctgccccaagactaatatcttctaatggtgcattagcaaggaaggcagaaatcaatatttagatatcagtagagtacataatactgtagaaagaagaagagcacacatgagacagagaaggaggtggatgctcctgggttgagagcaaggggtgggggtgtggaagggactaggc

SEQ ID NO: 8796 - DNA, 422 bp, Homo sapiens
  unsure (224): n=A,T,C or G
  unsure (264): n=A,T,C or G
  unsure (341): n=A,T,C or G
ttttttttttttttttttagctgccatcttgcgtccccgcgtgtgtgcgcctaatctcaggtggtccacccgagaccccttgagcaccaaccctagtcccccgcgcggccccttattcgctccgacaagatgaaagaaacaatcatgaaccaggaaaaactcgccaaactgcaggcacaagtgcgcattggtgggaaaggaactgctcgcagaaagaagaaggnggttcatagaacagccacagcagatgacaaaaaacttcanttctccttaaagaagttaggggtaaacaatatctctggtattgaagaggtgaatatgtttacaaaccaaggaacagngatccactttaacaaccctaaagttcaggcatctctggcagcgaacactttcaccattacaggccatgctgagacaaagca

SEQ ID NO: 8797 - DNA, 202 bp, Homo sapiens
  unsure (8): n=A,T,C or G
  unsure (19): n=A,T,C or G
  unsure (166): n=A,T,C or G
gattaatnttgggacaaanaattttatagaaatttttaaacatctgaaaaagaagcttaagttttatcatcctttttttctcatgaattcttaaaggattatgctttaatgctgttatctatcttattgttcttgaaaatacctgcattttttggtatcatgttcnaccaacatcattatgaaattaattagattcccatgg

SEQ ID NO: 8798 - DNA, 576 bp, Homo sapiens
ctgtatgatttcagcagccaaagctggatgatggactgaaacattactatacaactgggacaaaacatatacaatatcacaatactaagcaaaaacgctttacacccaaagaaataaaacaggttacaaaatgtggagaatttagcaggcaaaactgtattacaagcaacattttaaatcatcatttttaatccattgcaactatttaaaacatctaaaacaaatataaaaatgagccttttagtattttactgacgtgatttttttgtctttaaatatttgttaaagcttgatgttatactcaaagtacatattatatagctaaaatgtcaagtgagaagagtgtatacaaagtggtccaagttttatttcaaactctgatttccaattaacccttctaagtattattctttaagttatagtttcatccatggtgaaaaagatttagaaggttgcctaaaattttcacatctatgtctttgagtaaataattagaccatgttgaaaattcccaggtctagtaaatcaggtttaaaatattctgaacttgtagaaataccaactggtaacagttgg

SEQ ID NO: 8799 - DNA, 374 bp, Homo sapiens
  unsure (26): n=A,T,C or G
  unsure (31): n=A,T,C or G
  unsure (36): n=A,T,C or G
  unsure (68): n=A,T,C or G
  unsure (102): n=A,T,C or G
  unsure (132): n=A,T,C or G
  unsure (146): n=A,T,C or G
  unsure (159): n=A,T,C or G
  unsure (163): n=A,T,C or G
  unsure (169): n=A,T,C or G
  unsure (184): n=A,T,C or G
  unsure (201): n=A,T,C or G
  unsure (208): n=A,T,C or G
  unsure (218): n=A,T,C or G
  unsure (239): n=A,T,C or G
  unsure (252): n=A,T,C or G
  unsure (268): n=A,T,C or G
  unsure (293): n=A,T,C or G
tttttttttttttttttttttttttngattnaaaanattttattttctttatgcaggtaggcagttanaaatttcaaagtctaacaatgacattcttgaagngggcacagccttttaaactcaggctatgtntacagtaaccttgnggaactggttcanccanatcttnactttcatgaaagcncagggtctgtccttttntttccanagggctcctntcatattccatcgccagtttntgttacaaggcanactgaatcaagccaanatcaacacacactggtacacgtggntcccaaccaattttatatgtatatatatattctacttccaacacccgcattcatcctggttcaatcaaagcctggttttgg

SEQ ID NO: 8800 - DNA, 434 bp, Homo sapiens
ccacggccaaggaggatgctggcctggaaggggacttcagaagctacggggcagcagaccactatgggcctgaccccactaaggcccggcctgcatcctcatttgcccacatccccaactacagcaacttctcctctcaggccatcaaccctggcttccttgatagtggcaccatcaggggtgtgtcagggattggggtgaccctgttcattgccctgtatgactatgaggctcgaactgaggatgacctcaccttcaccaagggcgagaagttccacatcctgaacaatactgaaggtgactggtgggaggctcggtctctcagctccggaaaaactggctacattcccagcaactacgtggcccctgttgactcaatccaagctgaagagtggtactttggaaagattgggagaaaggatgcagagaggcag

SEQ ID NO: 8801 - DNA, 607 bp, Homo sapiens
  unsure (524): n=A,T,C or G
ggggaccgagtctttgtccactacactggctggctattagatggcacaaagtttgactccagtctggatcgcaaggacaaattctcctttgacctgggaaaaggggaggtcatcaaggcttgggacattgccatagccaccatgaaggtgggggaggtgtgccacatcacctgcaaaccagaatatgcctacggttcagcaggcagtcctccaaagattccccccaatgccacgcttgtatttgaggtggagttgtttgagtttaagggagaagatctgacggaagaggaagatggcggaatcattcgcagaatacagactcgcggtgaaggctatgctaagcccaatgagggtgctatcgtggaggttgcactggaagggtactacaaggacaagctctttgaccagcgggagctccgctttgagattggcgagggggagaacctggatctgccttatggtctggagagggccattcagcgcatggagaaaggagaacattccatcgtgtacctcaagcctanctatgcttttggcagtgttgggaaggaaaagttccaaatcccaccaaatgctgagctgaaatatgaattacacctcaagagtt

SEQ ID NO: 8802 - DNA, 414 bp, Homo sapiens
  unsure (7): n=A,T,C or G
  unsure (11): n=A,T,C or G
  unsure (21): n=A,T,C or G
  unsure (24): n=A,T,C or G
  unsure (35): n=A,T,C or G
  unsure (43): n=A,T,C or G
  unsure (55): n=A,T,C or G
  unsure (70): n=A,T,C or G
  unsure (79): n=A,T,C or G
  unsure (80): n=A,T,C or G
  unsure (85): n=A,T,C or G
  unsure (143): n=A,T,C or G
  unsure (207): n=A,T,C or G
  unsure (304): n=A,T,C or G
  unsure (315): n=A,T,C or G
  unsure (339): n=A,T,C or G
  unsure (353): n=A,T,C or G
  unsure (354): n=A,T,C or G
  unsure (385): n=A,T,C or G
  unsure (398): n=A,T,C or G
aatgaangtgnacatctattnctnagggagtgtgnaggcacanaaactgttattngggcattctacgganggagatatnnttgancttgttgatggtcactttgataccaagattggacacaaagtagagagtgaaagttacngaaagattgcagacagcattgggtgctcaaccaacaacattttgtttctgacagatgttactcnagaggccagtgctgctgaggaagcagatgtgcacgtagctgtggtggtgagaccaggcaacgcaggattaacagatgatgagaagacttactacagnctcatcacatncttcagtgaactatacctgccttnctcaacctagagannggttgttaaggcagaccgccctgttccccanagttgtccctgtngtgtctaggtttattc

SEQ ID NO: 8803 - DNA, 504 bp, Homo sapiens
  unsure (8): n=A,T,C or G
  unsure (10): n=A,T,C or G
  unsure (489): n=A,T,C or G
gattgtancnatgttggtgtatctcgtgtacaagatggaaaagtgcttttgttgttctacctgatccagttgggggagcaggaatagggggtgcctgcctaacggcctctagcccatgtgcttatactgggatctgtcccgagggatctgcacctggttggcagtcattttgtggtggacgtggtaaatcgcgagtgttaccatgatgacgaggcccaagatgagccccaaaatcaggggcaaggtttcttccagttgcccccgctcatccactgggcatttatgctcttcactgaagacaaaatctgagataatgtcaaaaggttggatgtggaccgcagacaggatcatggtgaccgtcttctgcggatcactagaggccagtgaaatggtttgttgagcttgacactcataggacttcccagcgggggtgaccaaggcagagaggtggtgcgagttggctgtgtgcttcccagcactgactgcgtnttttgaagtgggttt

SEQ ID NO: 8804 - DNA, 205 bp, Homo sapiens
  unsure (5): n=A,T,C or G
atggngattgatgaggagcttctgggagatggacacagctatagtcctagagctattcattcatggctgaccagggccatgtacagccggcgctcgaagatgaaccctttgtggaacaccatggtcatcggaggctatgctgatggagagagcttcctcggttatgtggacatgcttggtgtagcctatgaagccccttcgctgg

SEQ ID NO: 8805 - DNA, 525 bp, Homo sapiens
  unsure (17): n=A,T,C or G
  unsure (18): n=A,T,C or G
ccaattatttccaattnntattttattcttaaaacttaagcatggtaaaatgttaagctgttttcatccactgatattattctactataaaaagcccttcttgagcagatttgatgataaaaaggagaacatttctaaggtataattagagaagctgttgcatgagaaatcatgtctccatctccattttgctatgcgttatctgaggattgtttctgaaagagatctatttaggcagtgtatgtatgtgtcagcatgtaaaaagtaaagaactgaaaatagacaaaccttgtaaatgcacttcaaaaccaattgtggctcaagtgtaggtggttccccaaggctggtaccaatgagactggggtttgggaattagttggtcatcatccctcctgctgcccagcagtggtcagtcatttttcatgagggatggactaggaaaatgaagtgtctattataaggagagttcctgtaacttaaggagcaagctcactacaaaacccagctacctgcttatcgtagtgg

SEQ ID NO: 8806 - DNA, 399 bp, Homo sapiens
  unsure (18): n=A,T,C or G
cgccgccatgtccgacancgagaagctcaacctggactcgatcatcgggcgcctgctggaaggtgacatacacggccagtactacgaccttctgcgactatttgagtatggcggtttccctcccgagagcaactacctctttctgggggactatgtggacaggggcaagcagtccttggagaccatctgcctgctgctggcctataagatcaagtaccccgagaacttcttcctgctccgtgggaaccacgagtgtgccagcatcaaccgcatctatggtttctacgatgagtgcaagagacgctacaacatcaaactgtggaaaaccttcactgactgcttcaactgcctgcccatcgcggccatagtggacgaaaagatcttctgctgccacggagg

SEQ ID NO: 8807 - DNA, 603 bp, Homo sapiens
  unsure (16): n=A,T,C or G
  unsure (543): n=A,T,C or G
  unsure (544): n=A,T,C or G
ctgaaagatgagtttnttaaacttctgcagatttcactgtggggaaataagtgtgatctgtctctctcaggtggagaaagtagttctcagaataccaatgtactaaattcattggaagacctaaaacctttcattttattgaatgatatggaacatctttggtcattgcttagcaattgcaagaaaacaagagaaaaagcttctgctactagagtgtatattgttctcgataattctggatttgagcttgttacagatttaatattagccgacttcttgttgtcctctgaactggctactgaggttcatttttatggaaaaacaattccatggtttgtttctgatactactatacatgattttaattggttaattgaacaggtaaaacacagtaatcataagtggatgtccaagtgtggggctgactgggaagagtatattaaaatgggtaaatgggtttaccataatcatatattttggactctgcctcatgagtactgtgcaatgcctcaggttgcacctgacttatatgctgaactacannaaggcacatttaattttattcaagggtgatttgaattacaggaagttgacaggtgacag

SEQ ID NO: 8808 - DNA, 608 bp, Homo sapiens
  unsure (15): n=A,T,C or G
  unsure (16): n=A,T,C or G
  unsure (551): n=A,T,C or G
  unsure (593): n=A,T,C or G
  unsure (600): n=A,T,C or G
cctttggtcagagtnncagttggataaaccatgtgatttaatgtgaacatctgtttttgctctggaaggaggctggagtgagtagctcaatcagtctagagggtgctaaatgcttaggtaagggactctgataaaacttctggacacccaagctcagaggaactactctagtggacagcactttgcatgtgctgtcattcatcatttaggggaaaattaagtgtgtcctagtgtcattacactggaaagagacactaagaaatgtatgtctggcttctatttgccccatctgccatttccctttgcccttttgatctgtatcttttccctgaatgaacagtatccataaataccacaggctttctgagtcctctgagtttttctagtgaattgccaaaaccaaggattgttttggagtaaaacaaaactcaaacaaggctgttatgagaattaaatacaacagtgcatttaagatagtgcctggtatatgatacaaattcaatcaatttttgtagttatagttaccttaagccccttacatgttgcatgtntaaaactaacacaattgatagtcactctatttatttatctgngaactgnctttcttc

SEQ ID NO: 8809 - DNA, 330 bp, Homo sapiens
  unsure (19): n=A,T,C or G
ctgcatcccatgtgcgtcnatgggcaaagtatttgtagcactgcccttggaatttgtgccagccatagtcacatgtctcggtatcttgctcacaaagtgcaccaacataacttggaaggcagaggcacctgaatgtgttaaaaccatcaacacaagtggctccattacgacagggattagagtgacattcatcaaaatcaagttcacactggtctccgctgtatcctggcacacaggtgcatacgtaggaagtttcagtaggataacaggtgcctccgttaaggcacgggttcattttgcagcgatcaggtcctggtaaatagattgccg

SEQ ID NO: 8810 - DNA, 347 bp, Homo sapiens
cccgaagatgataccatccctgatgaggaacattttattgacatagaagatacaccaggatatcagactgccttctcacagttggcatttgctgggaaaaaagagcatgatcctgtaggtcaaatggtgaataaccccaaaattcacctggcacagtcacttcacaagttgtctaccgcctgtccaggaagggttccatcaatggtgagcaccagcctgaatgcagaagcgctccagtatctccaagggtaccttcaggcagccagtgtgacactgctttaaactgcatttttctaatgggctaaacccagatggtttcctaggaaatcacaggcttctgagcacag

SEQ ID NO: 8811 - DNA, 491 bp, Homo sapiens
  unsure (19): n=A,T,C or G
  unsure (456): n=A,T,C or G
ggccagcctcagcctcccnaagtgctgggattacacgtgtgagtcaccacgccaggcaaggcatggatgttttccaaaaactccctaggggatcttgatatttatctaggtctggtctgaatcatatgatatgctttataactattatctacccatacatgtgtacatttctatccttcctatgttttttaaactgaggtataaattagataatgtacacatgttgatgaattttgatctaggtatacactgtgtacctatcacccagattaaaatatagaacgtttctcttccccaaaggtcattgctatcctgttaccaccttcagttttgcacgttcttgaacttcaggccagtgctgctgtggatgccagtggtttttttttcactgctgagctgtattctgttgtgtggatataccacaattttattatccatcctctgttgacagggttngtttccagtctttcactactgcaaataatgctgct

SEQ ID NO: 8812 - DNA, 617 bp, Homo sapiens
  unsure (18): n=A,T,C or G
  unsure (19): n=A,T,C or G
  unsure (20): n=A,T,C or G
  unsure (36): n=A,T,C or G
  unsure (583): n=A,T,C or G
atttgttatcagtgtacnnnctaattgagagcattncagtagtatcaaacaataatgtctactgtttatagtccacttaataaaaatagaggcatttactatttgccttaggctgataggaatgtgggttttcttgaccaaatatatcagcatctaattgaaatgaccaaatagcattcttagacttctgtattatgaatataattgatatttaaattaatgtcttgttcacatatgtgtactttcatatttgattttaaaatgtacattataacctgtatggtattttatttaaaggagataaacagccaaatagcaaataggtcactgaatgataagatttgcaccttagaacaataatcattttaaggataacaagtaaatgtctgaaagcatgaggggctttatttgcctttacctcatatgagtctttgatcttgaaccgatacttttggatctcattgttgatatacctgaatttactttgtaagagattttaacttcacttcatgctgatgatgtatcaaattcattttatagaaagatttaaagtttttttctggaagtgatatatgtcaaattncatttcctactgcagtatttgagcagggacagtc

SEQ ID NO: 8813 - DNA, 444 bp, Homo sapiens
  unsure (19): n=A,T,C or G
ccagttttgaggatcagangaagaaaggcttcctctgtgacattactttaatcgtggagaatgtacatttccgggcccacaaagccttacttgctgccagtagtgaatacttctcaatgatgtttgcagaagagggggaaatcggccaatccatttatatgctggaaggcatggttgcagacacctttggtatcctgctggaatttatctacacaggttatctccatgccagtgagaaaagtacagaacaaatcctggctactgctcagttcttaaaagtctatgacctggtaaaggcttacacagacttccaaaataatcatagctccccaaagccaacaactttgaacactgctggtgccccagtggttgttatctctaataagaaaaacgatcctccaaagcggaaacggggaagaccaaaaaaagtcaatacattgcagg

SEQ ID NO: 8814 - DNA, 618 bp, Homo sapiens
  unsure (15): n=A,T,C or G
  unsure (16): n=A,T,C or G
ccacctggagacggnnattttgggcctattgaagacacctgctcagtatgacgcttctgagctaaaagcttccatgaaggggctgggaaccgacgaggactctctcattgagatcatctgctccagaaccaaccaggagctgcaggaaattaacagagtctacaaggaaatgtacaagactgatctggagaaggacattatttcggacacatctggtgacttccgcaagctgatggttgccctggcaaagggtagaagagcagaggatggctctgtcattgattatgaactgattgaccaagatgctcgggatctctatgacgctggagtgaagaggaaaggaactgatgttcccaagtggatcagcatcatgaccgagcggagcgtgccccacctccagaaagtatttgataggtacaagagttacagcccttatgacatgttggaaagcatcaggaaagaggttaaaggagacctggaaaatgctttcctgaacctggttcagtgcattcagaacaagcccctgtattttgctgatcggctgtatgactccatgaagggcaaggggacgcgagataaggtcctgatcagaatcatggtctcccgcagtgaagtgga

SEQ ID NO: 8815 - DNA, 613 bp, Homo sapiens
  unsure (18): n=A,T,C or G
  unsure (589): n=A,T,C or G
ctgctcttgaaggacagngacttgttaccaccacaacagcagagcctgccatccccaacagatcaccagttgtccctgacatcgtgccctaccttgtctccctttgtggtctcctaaatgcccatctcgttggccttggttcggctagtggtatggaggggtgctgcctagcactgacctgagagtgtgtgtgacccactgacccaatggtgagaactgactgcccacctctccaactgattgttcaaagggtagaggagacaaagtgcagatctcaccctttcttggtattttcccttctacccttttggaagatagagtggctatttgaagttaaaggaaagggaaggggcacagaaacagtattacttggtgtgtttgtgtagtgggttttcttggggagggagaggagagttaagtactttaaaggatagaaagaaaataatgagacaagagagtttaggtgtgcttgggaactgtcttaggtaatgatcctggaagaggccagcttgtactggaacccagatatgcttaggagtcaaccttgacattgaagtcatttgcatttctttcctactggctaccagancctctcagtcatcatactgagact

SEQ ID NO: 8816 - DNA, 351 bp, Homo sapiens
  unsure (18): n=A,T,C or G
gtctttaaaccctgcgtngcaatccctgacgcaccgccgtgatgcccagggaagacagggcgacctggaagtccaactacttccttaagatcatccaactattggatgattatccgaaatgtttcattgtgggagcagacaatgtgggctccaagcagatgcagcagatccgcatgtcccttcgcgggaaggctgtggtgctgatgggcaagaacaccatgatgcgcaaggccatccgagggcacctggaaaacaacccagctctggagaaactgctgcctcatatccgggggaatgtgggctttgtgttcaccaaggaggacctcactgagatcagggacatgttgctgg

SEQ ID NO: 8817 - DNA, 385 bp, Homo sapiens
  unsure (15): n=A,T,C or G
cctcgtgcttcgccngcgcctcgtgcagcagcagcaggttgccctcgctcacagctctggttacttccgcaaactgcatcaggtgatactttttcaggagctccacagtgggcatgtgacccaatagcatttttactggaagcaaatagatcagaatcatccttttgttcttctgactagaacggtgacaatgctcaaaggcaaatgacaggtactcctcagcttgcttaaaatcgctgtcaaacatagccttgcgtccaacgtagtatttgtatgttactctctgtgcagtgctgtaatcgtctttcaggtttgagctgtcaattgctctaattaggggtttacataaatggagtttgttgatcttgaagtagattttaaacag

SEQ ID NO: 8818 - DNA, 575 bp, Homo sapiens
  unsure (17): n=A,T,C or G
  unsure (18): n=A,T,C or G
  unsure (143): n=A,T,C or G
  unsure (262): n=A,T,C or G
  unsure (265): n=A,T,C or G
  unsure (506): n=A,T,C or G
  unsure (544): n=A,T,C or G
ggctgaggcaggagaanngcgtgaacccgggaggtggaggttgcagtgagccgagattgcgccactgcactccagcctgggcgacagagcgagactgtctcaaaaaaaaaaaaaaaaaaaaaaaagaacggaatgtactgganatgtatttgataaccaaggttttaggtaaattttcaccagtattagttctatttgcaaactgaaaaatgttgtaggcttaatataaaataaccacattagtgaacattatatctcttanaanaaaggccatattttgctcctgcttctgtaaaaatattatttgtttgaaggggaaataatggtagtgtgacctttcacttaattcctactcccttaatgtgagagagacaaaatgagctgaagaaggaaaattctggagttacactccacaaccttgaacatactgacggacatctctgttttgacaacgatttctccatgccacccatgctctaatgccttgtggatcacggacaaccctntttgcacaagctacagcatcagcgatgttatcttgcancaaagcactgcaggataaatgacaggcatta

SEQ ID NO: 8819 - DNA, 161 bp, Homo sapiens
  unsure (70): n=A,T,C or G
  unsure (104): n=A,T,C or G
  unsure (115): n=A,T,C or G
  unsure (116): n=A,T,C or G
atcatgaaaatgggtctgttgtgcgaagtgtctgccgctgtgcctgctgtgttatttttaactgatctantggggctcggccccatgtttgaaggccaaaaacntgtcggtgttnnttttttgtttttgttttagtaatgtgtaatttatccttgataacg

SEQ ID NO: 8820 - DNA, 620 bp, Homo sapiens
  unsure (19): n=A,T,C or G
  unsure (589): n=A,T,C or G
  unsure (590): n=A,T,C or G
tccagatttttgaaaaatncaatgtctaatggttatgaagaccacatggccgaagactgcaggggtgacatcgggagaacgaatttgatcgtcaactacctccctcagaacatgacccaggatgagttacgaagcctgttcagcagcattggtgaagttgaatctgcaaaacttattcgggataaagtagcaggacacagcttgggctatggctttgtgaactacgtgaccgcgaaggatgcagagagagcgatcaacacgctgaacggcttgaggctccagtcaaaaaccattaaggtgtcgtatgctcgcccgagctcagaggtgatcaaagacgccaacttgtacatcagcgggctcccgcggaccatgacccagaaggacgtagaagacatgttctctcggtttgggcggatcatcaactcgcgggtcctcgtggatcagactacaggtttgtccagaggggttgcgtttatccggtttgacaaacggtcggaggcagaagaggcaattaccagtttcaatggtcataaacccccaggttcctctgagcccatcacagtgaagttttgcagccaaccccaaccannaacaaaaacgtggcacttcctctcgcacct

SEQ ID NO: 8821 - DNA, 571 bp, Homo sapiens
  unsure (17): n=A,T,C or G
  unsure (279): n=A,T,C or G
  unsure (298): n=A,T,C or G
  unsure (302): n=A,T,C or G
  unsure (530): n=A,T,C or G
  unsure (538): n=A,T,C or G
ctgggcacagtggctcncacctgtaattccagcactttgggaggccaaggcgggtggatcacctgaggtcaggcattcgagaacagcctggcccacatggcgaaaccccatctctactaaaaatacaaaaattagcccggtatggaggcatgtgcctgtaatcccagctacttgggaggctgaggcaggagaatggattgaacccaggaggcagaggttgcagtgagccaagattgcaccattgcactccagcctgggcaacagaacaagactccatcnaaaaaaaaaaaaaaaaaangaangaaagaagaaaagaaaattagccaggtgtggttgcatgcacctgtagtcccagcactttgggaggccaaggcaggaggatcaatcaaggctaggagtttgagactgcagaaagaaaccctgtctctaaaaaaaaggtccaggtaatttcagggtccagctccaccacaagcgcagctccaggggctgttgagttttgcctttatcattccaagtagtccctgctccanaccaagtnccaccatctggcagtcaggtcagtccaaccaca

SEQ ID NO: 8822 - DNA, 444 bp, Homo sapiens
  unsure (19): n=A,T,C or G
  unsure (20): n=A,T,C or G
  unsure (21): n=A,T,C or G
  unsure (342): n=A,T,C or G
  unsure (414): n=A,T,C or G
gtttctgctcgctcaaccnnnttgtcgtgttgccctcgcttctcagatccccgccggaagtgaagagagcaagcagatttgaacctatctgctttcaagctggtcatcatgatgaaacttagacacaaaaataaaaagccaggtgaaggttccaagggccacaagaagataagttggccctaccctcagcctgcaaagcaaaatgggaagaaagcaacctccaaagtgccctccgcacctcattttgttcaccccaatgatcatgccaatcgagaggctgaattaaagaagaagtgggttgaggagatgagggagaagcagcaagccgcccgggagcaaganagacaaaaacgcaggaccattgagagctactgtcaggatgtcctaagacgccaggaggagtttgagcataangaggaagttttgcaggaattaaatatgttt

SEQ ID NO: 8823 - DNA, 525 bp, Homo sapiens
  unsure (18): n=A,T,C or G
  unsure (19): n=A,T,C or G
  unsure (20): n=A,T,C or G
ccactacgataagcaggnnnctgggttttgtagtgagcttgctccttaagttacaggaactctccttataatagacacttcattttcctagtccatccctcatgaaaaatgactgaccactgctgggcagcaggagggatgatgaccaactaattcccaaaccccagtctcattggtaccagccttggggaaccacctacacttgagccacaattggttttgaagtgcatttacaaggtttgtctattttcagttctttactttttacatgctgacacatacatacactgcctaaatagatctctttcagaaacaatcctcagataacgcatagcaaaatggagatggagacatgatttctcatgcaacagcttctctaattataccttagaaatgttctcctttttatcatcaaatctgctcaagaagggctttttatagtagaataatatcagtggatgaaaacagcttaacattttaccatgcttaagttttaagaataaaataaaaattggaaataattgg

SEQ ID NO: 8824 - DNA, 624 bp, Homo sapiens
  unsure (19): n=A,T,C or G
ctgaaaatcttttagtaanagctttaaagatgagcccatgaattcactttaaatttcaccagttaaattaggtcaaatggaaggaactcaaatgagtattgcccaatcagagcccattatttgtaagtcatcagtaaccttaaaactccacttagacctaattattgaaaacttgcatataatgaagtgaaagaatttccattcatcaacctctcaatcccaggttttcaaagaaaaacctatctaaggaatacttaccaaaatcagataagaaaatttaaacctgcatagttatcagatttgttccactacaaccagtctgcatacagttacacatcaattcgttctgtatacactctagaactgaacagaacaaagtttagcatagaaaagctgtaagaaacaggttcctaattacggaagttgcaaagttcaaaagggtatgaaaaaaactaatgtaaattcgatacttccttcgtttcaaagaaatagactttctgtaaaaatatatacaatttttacaaatacatttacaagctgtcttaagaattgaggatatccatattcataactaattactgagccttccgtcaagtattattggtgataaactaggctaataaa

SEQ ID NO: 8825 - DNA, 619 bp, Homo sapiens
  unsure (16): n=A,T,C or G
  unsure (587): n=A,T,C or G
  unsure (590): n=A,T,C or G
ggcgcctcctgtcacncctgtatcgggggcaccaacgtgcgtgctgaggtgcagaaactgcagatggaagctccccacatcatcgtgggtacccctggccgtgtgtttgatatgcttaaccggagatacctgtcccccaaatacatcaagatgtttgtactggatgaagctgacgaaatgttaagccgtggattcaaggaccagatctatgacatattccaaaagctcaacagcaacacccaggtagttttgctgtcagccacaatgccttctgatgtgcttgaggtgaccaagaagttcatgagggaccccattcggattcttgtcaagaaggaagagttgaccctggagggtatccgccagttctacatcaacgtggaacgagaggagtggaagctggacacactatgtgacttgtatgaaaccctgaccatcacccaggcagtcatcttcatcaacacccggaggaaggtggactggctcaccgagaagatgcatgctcgagatttcactgtatccgccatgcatggagatatggaccaaaaggaacgagacgtgattatgagggagtttcgttctggctctancanagttttgattaccactgacctgctggacc

SEQ ID NO: 8826 - DNA, 620 bp, Homo sapiens
  unsure (17): n=A,T,C or G
  unsure (18): n=A,T,C or G
  unsure (574): n=A,T,C or G
  unsure (607): n=A,T,C or G
ctgctcgggaggctganncacaagaatcgcttgagccagggaggtggaggttgcagtgagctgagatcacatcattgcactccagcctgggcaacgggcgagactctgtctcaaaaaaaagaaagaaagaaaaggtacatgtatatatttgtcctgcattatgttttttacttgatataaatgtatttttactgtgatagtccaagtgccctggggggcaggtgtgctctatgtggttcttcttccattggagagctggcgtagagatctgcagtgttcacaaggatgttggtttggagatgtctgctgctaggacctggggtgtgtgactcagtccatatgagagggacatctgggtggaggagtaaattcctgtgctctgaaatgccacttggtagctctggacaatgaaggacaattgactcaagggtgcctggcttctgctgctgctgggaaaaaattcagtttatagcattcctgcacctcccaaagtagataacctggaggtcattcagttaacaactgtccctgaggactcagttttgggggaggggttatctgggagaagctttancctgttctgagccattaggagacattagtgaanttggagcactgga

SEQ ID NO: 8827 - DNA, 254 bp, Homo sapiens
  unsure (17): n=A,T,C or G
  unsure (18): n=A,T,C or G
  unsure (19): n=A,T,C or G
  unsure (33): n=A,T,C or G
  unsure (58): n=A,T,C or G
  unsure (96): n=A,T,C or G
  unsure (176): n=A,T,C or G
  unsure (207): n=A,T,C or G
  unsure (221): n=A,T,C or G
  unsure (226): n=A,T,C or G
caagctttttttttttnnntttttttttttttngcttattaaactagttttactttancaccgttcttagtggagcaggattcttgatcatggggnggaattttgtgtatctgggcttcatgggatgcataaaattttccagttggtaagcagcaggtgccgagggtctggatcanaaaaaaaggcaggcagccgggttcccactcnccttccatgagctntccgnagctcaccggccatcacttgaagcaaac

SEQ ID NO: 8828 - DNA, 300 bp, Homo sapiens
  unsure (8): n=A,T,C or G
ccattcanacaattgcccccttgtgggaatgcgggaatgaatggtacagtggacaccccagcaccattgacgttataaacatgtaaatgaaacacattagggcagacaatcaattgtctgtgagcattgcaaacctgcactccctctctctgtgacaggcacaaaatagtgtctaccttgggaagccacggtgctgagaggaaaaggacaaagaatttcctttcacacagaagaaaatgcaccttaaaagccttggaagaatgcagatgacaaaaactgttgcaaggaaaagaatctccc

SEQ ID NO: 8829 - DNA, 616 bp, Homo sapiens
  unsure (15): n=A,T,C or G
  unsure (604): n=A,T,C or G
  unsure (605): n=A,T,C or G
  unsure (609): n=A,T,C or G
ccagtggaatgatgncccctgcaattaccatctcacctatacgtgcaagaaaggaacagtcgcttgcggccagccccctgttgtagaaaatgccaagacctttggaaagatgaaacctcgttatgaaatcaactccctgattagataccactgcaaagatggtttcattcaacgtcaccttccaactatccggtgcttaggaaatggaagatgggctatacctaaaattacctgcatgaacccatctgcataccaaaggacttattctatgaaatactttaaaaattcctcatcagcaaaggacaattcaataaatacatccaaacatgatcatcgttggagccggaggtggcaggagtcgaggcgctgatccctaaaatggcgaacatgtgttttcatcatttcagccaaagtcctaacttcctgtgcctttcctatcacctcgagaagtaattatcagttggtttggatttttggaccaccgttcagtcattttgggttgccgtgctcccaaaacattttaaatgaaagtattggcattcaaaaagacagcagacaaaatgaaagaaaatgagagcagaaagtaagcatttccagcctatcnnattnctttagt

SEQ ID NO: 8830 - DNA, 396 bp, Homo sapiens
  unsure (16): n=A,T,C or G
  unsure (18): n=A,T,C or G
  unsure (19): n=A,T,C or G
  unsure (295): n=A,T,C or G
ctgactcaaggaccancnnatctttcttggctgctgtgttttctacccagcaaagggtccggtgggaaccccctcagccaaatgggagccactgacttctgtggggcccagaatctgactcaggcccagggaaatctgattcccacgtcaaagctcaggactcggagctgcactggttccgaacacagagcaggcataaagttctgatgccagaagaaggcaggaaactccaacgagctttaatcactctcccatcacgaacagctctagtgacagcttggcctttctatcccangagttcaaagagtttccatcgttcattctcacaaaggcccatgtcccctctgcctcgttcctgcttcactttattgaagtaactgtgaccccagatagaat

SEQ ID NO: 8831 - DNA, 162 bp, Homo sapiens
  unsure (7): n=A,T,C or G
  unsure (27): n=A,T,C or G
  unsure (55): n=A,T,C or G
  unsure (81): n=A,T,C or G
  unsure (132): n=A,T,C or G
  unsure (134): n=A,T,C or G
  unsure (140): n=A,T,C or G
  unsure (142): n=A,T,C or G
  unsure (144): n=A,T,C or G
  unsure (150): n=A,T,C or G
ccaccantgagttactgggcccacatntgcctgcaagagggggaggggaattcangtaacccacaagaggggataaaagtncggggaagaaatctcctgtcaaggagtttgtttttgcagtggatcctctgnantgagantngntgtctntacaatatcatt

SEQ ID NO: 8832 - DNA, 432 bp, Homo sapiens
  unsure (15): n=A,T,C or G
  unsure (17): n=A,T,C or G
  unsure (319): n=A,T,C or G
  unsure (360): n=A,T,C or G
ctggcattggtctananctttataaggccattcagcgagggaccatcaagtgcaactttgcgggggttgccttgggtgattcctggatctcccctgttgattcggtgctctcctggggaccttacctgtacagcatgtctcttctcgaagacaaaggtctggcagaggtgtctaaggttgcagagcaagtactgaatgccgtaaataaggggctctacagagaggccacagagctgtgggggaaagcagaaatgatcattgaacagaacacagatggggtgaacttctataacatcttaactaaaagcactcccacgtntacaatggagtcgagtctagaattcacacagagccacctantttgtctttgtcagcgccacgtgagacacctacaacgagatgccttaagccagctcatgaatggccccatca

SEQ ID NO: 8833 - DNA, 318 bp, Homo sapiens
ctgtcattccggtcatcacacaaccaatgttttcagttatcttgaataagtgagtcactgtgctggaatccaataatttgtcaggtactttcttctgtgtgacaattactgcacagtctttccctctgacagctactgatgtaaggccaccctggttaatagccttaaaagcatattctacttggtagagccgaccctcgggtgaaaaaatggtaatgtggcggtcaaaaccggcgctggaaccacgggacatgttggtacaagcactactttaaacacaatccctgggccccgtagctcccgcaccaggcacacaag

SEQ ID NO: 8834 - DNA, 560 bp, Homo sapiens
  unsure (412): n=A,T,C or G
ccagtgccattggtggcctctgaacaggcgctgggaaggtgttagtatgtggggctcttaccaatggagggaccaggttaggctgagagagaatctggggtgcaaactgtgtaggaaatggttgtgtcattctcacagtggcaggggctgactggaactgcttctggtagacaatgctgttcattttgctggactggctgttcggacttgtagaagtagcccggaagggactagatgttggtgtggtgcttctaccagcgattggaggtgtgcctggttttatatcaatgccacttccaaaggcttttagttccatttcagacatttttcctgtggttgcaatcatgctatgctgtgttccagcaggaattaatcctctgaaaggctggcttacttgtgcaggacgactcanactctgagcctgtgcttggggagtggtatgctgtaatgggggctgaagagtctgaggcaaagcaattagaggttgccctgtagatccaaaattaggcaaggaaagctgggatgctggtaaaggtactgtaacctgctggagagcactt

SEQ ID NO: 8835 - DNA, 254 bp, Homo sapiens
  unsure (16): n=A,T,C or G
  unsure (18): n=A,T,C or G
  unsure (19): n=A,T,C or G
  unsure (132): n=A,T,C or G
  unsure (142): n=A,T,C or G
  unsure (145): n=A,T,C or G
  unsure (151): n=A,T,C or G
  unsure (178): n=A,T,C or G
  unsure (231): n=A,T,C or G
  unsure (236): n=A,T,C or G
  unsure (239): n=A,T,C or G
  unsure (244): n=A,T,C or G
  unsure (246): n=A,T,C or G
ggaaaatccggattgncnnccagggagagaaaagaggcacacccggagctggtatccctcacctccaccactcagcaaggcgccggacagatatccggagggcactctgcctctgccggggggtttttttanaaaaggaatngcntagaanatacagcaagagggaactccacaacancaaaagtgttccatatcggaaaagccaaggttgtcatgttttgtttaaaaaanaaaancgncaaancncaaaacct

SEQ ID NO: 8836 - DNA, 347 bp, Homo sapiens
  unsure (17): n=A,T,C or G
ctgctagagatgtgcanggatgtctgtgaagccatggaatacctggagtcaaagcagttccttcaccgagacctggcagctcgaaactgtttggtaaacgatcaaggagttgttaaagtatctgatttcggcctgtccaggtatgtcctggatgatgaatacacaagctcagtaggctccaaatttccagtccggtggtccccaccggaagtcctgatgtatagcaagttcagcagcaaatctgacatttgggcttttggggttttgatgtgggaaatttactccctggggaagatgccatatgagagatttactaacagtgagactgctgaacacattgcccaagg

SEQ ID NO: 8837 - DNA, 449 bp, Homo sapiens
  unsure (16): n=A,T,C or G
cctggctcaacaaaanggctggggattggccctgaaaggagagagctgactgtcctggctgatggacaggagatcctcttagcactaccctaaggcaggcagttgggcattggtgtagacaacaggaaagtccaggctatagccgtactcaaaaacctttctgttccctttctgccagccctagggattgagtccacattcagcacaggactctctgggtacagctctctttaggaagacacaaattgcatggtgaagtcagttatatcctggccgcctttggtccctcccaggaagacgggcatgttttctgcttgagaggtgctgatgtaccagttggggaactgggcagactcaaattccagcttgttattgatttctatcttgttgaagacaaatcgcttttccatcttcttctttgggtaatttttgggatctacactctccag

SEQ ID NO: 8838 - DNA, 616 bp, Homo sapiens
  unsure (16): n=A,T,C or G
ctgtgagcccagctangacctcagaggggctgcgtctctgcactgcacgccccagggagactggagccctgaagcccctagatgtacagtgaaatcctgtgatgacttcctgggccaactccctcatggccgtgtgctacttccacttaatctccagcttggggcaaaggtgtcctttgtttgcgatgaagggttccgattaaaaggcaggtctgctagtcattgtgtcttggctggaatgaaagccctttggaatagcagtgttccagtgtgtgaacaaatcttttgtccaaatcctccagctatccttaatgggagacacacaggaactccctttggagatattccctatggaaaagaaatatcttacgcatgcgacacccacccagacagagggatgaccttcaacctcattggggagagctccatccgctgcacaagtgaccctcaagggaatggggtttggagcagccctgcccctcgctgtgaactttctgttcctgctgcctgcccacatccacccaagatccaaaacgggcattacattggaggacacgtatctctatatcttcctgggatgacaatcagctacatttgtgaccccggctacctgtta

SEQ ID NO: 8839 - DNA, 510 bp, Homo sapiens
tctaaaggtaaaccaatctttgacaatgccaatagcagtgtcaatgttcctaaatgttggctgtatctatctacttactcattgtattcttgaggtttctttcctttggtttctatgatattccacatccctctcttttcattccattgtgtgagttctctctgtggatcttttgttagctcctcttattccttcttgcctatctgagtttcctgaaattaccttcaaatcatgtctcgaaagatgttctaaagagacctttgaataagaacaacatttgtcccattaataaatggtgggagtttcatatatctgtttctttttctcttctttcctctttgccttgtccaaaagagtgggaactgagcagtacagtcataaattaattttaatatcttaacttaggcatcagtacactggctattgttccttaatacatttaacacatagtcattgactgctgattatgtgccaagggctgtgcttggcactggggataaagaagttatt

SEQ ID NO: 8840 - DNA, 574 bp, Homo sapiens
  unsure (567): n=A,T,C or G
ctggggtgggcttctcctactccgatgacaagttttatgcaactaatggcactgaggtcgcccagagcaattttgaggcccttcaagatttcttccgcctctttccggagtacaagaacaacaaacttttcctgaccggggagagctatgctggcatctacatccccaccctggccgtgctggtcatgcaggatcccagcatgaaccttcaggggctggctgtgggcaatggactctcctcctatgagcagaatgacaactccctggtctactttgcctactaccatggccttctggggaacaggctttggtcttctctccagacccactgctgctctcaaaacaagtgtaacttctatgacaacaaagacctggaatgcgtgaccaatcttcaggaagtggcccgcatcgtgggcaactctggcctcaacatctacaatctctatgccccgtgtgctggaggggtgcccagccattttaggtatgagaaggacactgttgtggtccaggatttgggcaacatcttcactcgcctgccactcaagcggatgtggcatcaggcactgntgcgctc

SEQ ID NO: 8841 - DNA, 222 bp, Homo sapiens
  unsure (8): n=A,T,C or G
  unsure (17): n=A,T,C or G
  unsure (19): n=A,T,C or G
ttggcttntaattcgcncntgtacttccttttttgacaataaaagagtcaagatagcaccgaggccaggagaaagggaacgtgtaagtttttatatatacagtttccaagccaacttcgggaagccttaacctttttacggggtgggggtggggaggtaaaaagttgtgatctctgagaaaataaccgccactactctggaagtgttcatcagcagttatac

SEQ ID NO: 8842 - DNA, 541 bp, Homo sapiens
  unsure (17): n=A,T,C or G
  unsure (18): n=A,T,C or G
  unsure (19): n=A,T,C or G
tataaactgtggacaannncctctgccgatggttttcaaggacctacttttgtcctgaccacttacaagcaaactctccacacatatgaaaactttgatttggaatatgaagagctatcagaatacaaattgtggttttcaatgtcatgcctgtggttattttaatagcatacccaaaagggtgttcttttatcttaagtatttacaataccttcagagtttcagttctttattttataaagcaatgaattttaataagaatattgaaatttcttccatttgaccttctgagagaaatggaaagaactccagcttgggtagcacagcaagactccatctctacaaatttttttttaaaaattagccaggcgtgcagcacacaccagtggtcccagctaccagggaggatgaggtaggaggattgaggatcgcctgagcccaggagttcgaggttacagtgagctcgaggttacagtaactgcagtggtgccactgcactccagcctgagctggagagctggagagcaatactccatcccta

SEQ ID NO: 8843 - DNA, 452 bp, Homo sapiens
  unsure (9): n=A,T,C or G
  unsure (18): n=A,T,C or G
  unsure (20): n=A,T,C or G
  unsure (21): n=A,T,C or G
  unsure (313): n=A,T,C or G
ccttttacntgctgatancnnaagcaatctgtgtgcatgtgtacatatgcatctgttttcagggaaagaaaagctgttaaagccaattaaggttatgaattcttgctactactttaatattaaacctttaagtgaaaatttattgaacactattacaaatgtggcaaactgacatagctggtttactgcacaaactttaatgtcaaagggattagatcagagctccagtctcacttactgggcctataacattgtgcagggcacttatctcacctcaggaaaatggaagtaactgcttcattttacagaggtnttaaatgaaagaaatgagaaaactataaaccaacattgaagcctgaattattgcttagtatttaaagtctagtacaatttgcaatgtttttaataaaaaaactcattgataggtgtatttttacagtgtatctaaaagc

SEQ ID NO: 8844 - DNA, 587 bp, Homo sapiens
  unsure (17): n=A,T,C or G
  unsure (18): n=A,T,C or G
  unsure (19): n=A,T,C or G
  unsure (430): n=A,T,C or G
  unsure (574): n=A,T,C or G
gggctgtctggcaggcnnnaaactacattcagttgagtctgcaagactgggaggaactggggtgataagaaatctattcactgtcaaggtttattgaagtcaaaatgtccaaaaaaatcagtggcggttctgtggtagagatgcaaggagatgaaatgacacgaatcatttgggaattgattaaagagaaactcatttttccctacgtggaattggatctacatagctatgatttaggcatagagaatcgtgatgccaccaacgaccaagtcaccaaggatgctgcagaagctataaagaagcataatgttggcgtcaaatgtgccactatcactcctgatgagaagagggttgaggagttcaagttgaaacaaatgtggaaatcaccaaatggcaccatacgaaatattctgggtggcacggtcttcanagaagccattatctgcaaaaatatcccccggcttgtgagtggatgggtaaaacctatcatcataggtcgtcatgcttatggggatcaatacagagcaactgattttgttgttcctgggcctggaaaagtagagataacctacanaccaagtgacgga

SEQ ID NO: 8845 - DNA, 573 bp, Homo sapiens
  unsure (18): n=A,T,C or G
  unsure (19): n=A,T,C or G
gctgtccctgatgccgtnnaaagcagatactctagaacggaaggctcccttgatggaacttagacagcaaggccagatgcacatccctggaaggacatccatgttccgagaagaacagatgatccctgtatttcaagacctctgtgcacttatttatgaacctgccctgctcccacagaacacagcaattcctcaggctaagctgccggttcttaaatccatcctgctaagttaatgttgggtagaaagagatacagaggggctgttgaatttcccacataccctccttccaccaagttggaacatccttggaaattggaagagcacaagaggagatccagggcaaggccattgggatattctgaaacttgaatattttgttttgtgcagagataaagaccttttccatgcaccctcatacacagaaaccaattttcttttttatactcaatcatttctagcgcatggcctggttagaggctggttttttctcttttcctttggtccttcaaaggcttgtagttttgggtagtccttgttctttggaaatacacagtgctgaccagacagcct

SEQ ID NO: 8846 - DNA, 547 bp, Homo sapiens
  unsure (16): n=A,T,C or G
ctgagatgccccttcncttctgatgggttaaataagctgggaaattacccgagaagaccccggtaccacagtgtaaagcccaacgaaggggttgtttaatggtccaggggatacagaggctttaagaaacgtttccttaacgctaattcttatctggttaaacaaaacatagcaaaacatccccgatccgctcggcagaccatacacacccagcgacggcacttgatagttaatggggtttgttttaagcagatagaaaattttaagggagtcgaatcttgtgttgaatgcgttcgtgttgaatttgggccagtgtttccttgaagatcaaatgcaggttgcattttcctattgtttgtttaacagattgataggacaaactgaattagacttttcttcctgatgattcttggctcttctgcgctattattttaaaattccacgcctagattcatctatgctaataaagatgttgactttaagctttcaatttatagatgtagttgattaatatggggtatctgttttaaagagctttgttaagtgg

SEQ ID NO: 8847 - DNA, 607 bp, Homo sapiens
  unsure (16): n=A,T,C or G
  unsure (17): n=A,T,C or G
ggagaacctgatcatnnattctgaactcaaagacgacttgcttttgtatcaggacgaggaggcgctgaacgactccattatttctggaacactgccacggaaatgcaagaaggagctcctggccgtgaagctaaggaaccggccaagcaaacaggaactagaagaccggaacattttccccagaaggattgatgaagaaagacaggagatccggcagcagatcgagatgaagctttccaaacggctgagccaaagacctgccgtggaagagctggagagaagaaatatcttgaaacaaaggaatgatcagacagagcaggaagaaagaagagaaatcaagcaaagattgacaagaaagcttaatcagagacccactgttgatgaattaagagacagaaaaattctgatacgattcagtgattacgtggaagtagcaaaagcgcaggactatgacaggagggcagacaaaccctggacgagactgtcagcagcagataaggcagcaattcgtaaagaattaaatgagtacaaaagtaatgaaatggaggtacatgcatcaagcaagcacttgacaagattccacagaccatagagattttcttctgag

SEQ ID NO: 8848 - DNA, 572 bp, Homo sapiens
  unsure (10): n=A,T,C or G
  unsure (11): n=A,T,C or G
  unsure (426): n=A,T,C or G
  unsure (538): n=A,T,C or G
  unsure (565): n=A,T,C or G
gaaggcaccnncttacagatggtctgtatcatcttcctgtgagtgctctcagtctgaatgatcatcttcaatattctatctagtgatggagtgagaaaattctcctgaactctgggcaggaagttcatattgctcagggtgagccaccatgataaaaataactcacacaggctaattacaattaatctaggctcttgacctttaaaaaatgtatataatgtttacatatgtttataatgtcacgccatttatttcatttaaaattttaaatgattttatctttggtcctctcttacaacttattcttggtacaacttattctttgtactataacagcagagatgagtaattgggacagactagcctccaaagcataaacttatttatgatttggccctttacagtaaaagtctgctcatcccaggntttgcttgtcaatttatatactggcgtttgttcctgatcctatttatttatttctggcatccaactctggtagtttctttctgaatcagtttaatgaagtttgtaaatgatngtaattaaacgttatttattacttttnatttttt

SEQ ID NO: 8849 - DNA, 582 bp, Homo sapiens
  unsure (14): n=A,T,C or G
  unsure (16): n=A,T,C or G
  unsure (17): n=A,T,C or G
  unsure (450): n=A,T,C or G
  unsure (517): n=A,T,C or G
ccactgtgaaaaancnnccccctcaaaacttcaggagaatgtatataataaatgaaggtacaatttcataccttcacaggattattgagaaggtcaaattacataacagatatgaaagcactgtgtaaactatgcggactatgctgcaccaaataactgtaaagaattattaactagactgtaaatgccttgagggcaaggaatgcatctgcaacgggtatttgtgaagtacttgacagtttgctaaggacttctgtggattttcctcatatgctactcataacaaccctggaaggtaaggggaattgttatcccaaattccaaataaagacactgcaggtcagacatcacacaggtggtaaatagcaattctggtacttactttagatattctgctacaggcttgctattcaaagtgtggtatgtagaccagcaacattgactctctgngctatctttcttttttataaactcggaattatttcaaaataagaagtttctaacaaaagagattcanaagagtcaaacccttgggtgtgaaaaagttttaggaagactttcctgaatttatttttgcctata

SEQ ID NO: 8850 - DNA, 466 bp, Homo sapiens
  unsure (14): n=A,T,C or G
  unsure (16): n=A,T,C or G
  unsure (17): n=A,T,C or G
  unsure (91): n=A,T,C or G
  unsure (349): n=A,T,C or G
ctgtctaatccctncnngaactgtttatagaagcttgagaatggggtaaaaatttctgctagcaaaatcaagttctttttgaaattttatnagtaatccagaatttagtagtccatgccttctcactcagcatttagaaataaaaatgtggtttcttaaacgtatatcctttcatgtatatttccacatttttgtgcttggatataagatgtatttcttgtagtgaagttgttttgtaatctactttgtatacattctaattatattatttttctatgtattttaaatgtatatggctgtttaatctttgaagcattttgggcttaagattgccagcagcacacatcanatgcagtcattgttgctatcagtgtggaatttgatagagtctagactcgggccacttggagttgtgtactccaaagctaaggacagtgatgaggaagatggcagtggacctcggccg

SEQ ID NO: 8851 - DNA, 340 bp, Homo sapiens
  unsure (9): n=A,T,C or G
  unsure (10): n=A,T,C or G
  unsure (11): n=A,T,C or G
  unsure (270): n=A,T,C or G
ggaatgacnnnagacgtggctggaaagctggggccagatggcggagactcctcagctccacgttaacaacgtgctcccttggcaagccgtacagatcctttgaaggattttgagcagagaaatgacaagtttatactagaaacaagcagcatggaaggtaggctgcctgcatggagtctggaggaggagagcagcgcagagaatagtgtaaattcttcctgcaagtagtattgaggaggtacaaatgggaggatagaactggatttaaanagttttcagagagaagaaagtcaagtgaaataggacaaagagtccaaagtcagtccgtggtctccattcg

SEQ ID NO: 8852 - DNA, 492 bp, Homo sapiens
  unsure (468): n=A,T,C or G
taccaagacctgctcaatgttaagatggcccttgacattgagattgccacctacaggaagctgctggaaggcgaggagagcaggatttctctgcctcttccaaacttttcctccctgaacctgagggaaactaatctggattcactccctctggttgatacccactcaaaaaggacacttctgattaagacggttgaaactagagatggacaggttatcaacgaaacttctcagcatcacgatgaccttgaataaaaattgcacacactcagtgcagcaatatattaccagcaagaataaaaaagaaatccatatcttaaagaaacagctttcaagtgcctttctgcagtttttcaggagcgcaagatagatttggaataggaataagctctagttcttaacaaccgacactcctacaagatttagaaaaaagtttacaacataatctagtttacagaaaaatcttgngctagaatactttttaaaaggtat

SEQ ID NO: 8853 - DNA, 304 bp, Homo sapiens
  unsure (233): n=A,T,C or G
ttgtatatctcgttagtaatgtacatgctcttcaggttctagggctcctgttaggggagggagaaatgttgaatcaagagggaaaacaactactatgatttataaacatattttaatgtaaaaatttgcatttaaaaggagtggccctgttttctgtgttaaaaccccatttggtgctattgagtttgttctttattcttttatcccagtgaaaattgttgatcttgctgtanggaaaaattaaactctttgaatctccaaacaaggaagtttcagcattcccttatggatcagaggaacctta

SEQ ID NO: 8854 - DNA, 379 bp, Homo sapiens
  unsure (175): n=A,T,C or G
  unsure (196): n=A,T,C or G
  unsure (263): n=A,T,C or G
  unsure (300): n=A,T,C or G
  unsure (312): n=A,T,C or G
  unsure (323): n=A,T,C or G
  unsure (374): n=A,T,C or G
ggtcatgatgcagaagctactcaaatgcagtcggcttgtcctggctcttgccctcatcctggttctggaatcctcagttcaaggttatcctacgcagagagccaggtaccaatgggtgcgctgcaatccagacagtaattctgcaaactgccttgaagaaaaaggaccaatgttncgaactacttccaggtgaatncaacaagatcccccgtctgaggactgacctttttccaaagacgagaatccaggacttgaatcgtatnttcccactttctgaggactactctggatcaggcttcngctccggctccngctctggatcnggatctgggagtggcttcctaacggaaatggaacaggattaccaactagtnggacg

SEQ ID NO: 8855 - DNA, 491 bp, Homo sapiens
  unsure (9): n=A,T,C or G
  unsure (10): n=A,T,C or G
  unsure (18): n=A,T,C or G
  unsure (19): n=A,T,C or G
  unsure (20): n=A,T,C or G
  unsure (437): n=A,T,C or G
  unsure (459): n=A,T,C or G
  unsure (460): n=A,T,C or G
  unsure (463): n=A,T,C or G
ctggttctnnaatcctcnnntcaaggttatcctacgcagagagccaggtaccaatgggtgcgctgcaatccagacagtaattctgcaaactgccttgaagaaaaaggaccaatgttcgaactacttccaggtgaatccaacaagatcccccgtctgaggactgacctttttccaaagacgagaatccaggacttgaatcgtatcttcccactttctgaggactactctggatcaggcttcggctccggctccggctctggatcaggatctgggagtggcttcctaacggaaatggaacaggattaccaactagtagacgaaagtgatgctttccatgacaaccttaggtctcttgacaggaatctgccctcagacagccaggacttgggtcaacatggattagaagaggattttatgttataaaagaggattttccnaccttgacaccaggcaatgtanntangcatattttatgtaccatggttatatga

SEQ ID NO: 8856 - DNA, 469 bp, Homo sapiens
  unsure (443): n=A,T,C or G
  unsure (463): n=A,T,C or G
ttagttttagctcttgtattcatgtctgtaatcaattgaagttaatttttaatatagtatgtgttgggagtccagcttcattgttttgcatgtatctatgcaattgacccaaagtgatttgttgaaaaatattattttctgatggtatggtcctgacacccttgtagaaattcaattgaagatatatgtatgagtttacttctgcagtctcaattctattctattggtctaaatgtttatctttatgccagtaccagcctgttttggttattttagttttgtaataaaatagacaaacatttggccgattaatcaagacaaaaagaaaagtatatagaaataatattatgaaagaaaagggggagcatattgaaaaacaccataaagattaaaaagattaagggacagtgttaacaatttatgccaataggttttgataattnatattttgctaggaatttgnctattt

SEQ ID NO: 8857 - DNA, 262 bp, Homo sapiens
aaaaatagaagatgaatcattgattgaatagttataaagatgttatagtaaatttattttattttagatattaaatgatgttttattagataaatttcaatcagggtttttagattaaacaaacaaacaattgggtacccagttaaattttcatttcagataaacaacaaataattttttagtataagtacattattgtttatctgaaattttaattgaactaacaatcctagtttgatactcccagtcttgtcattgccag

SEQ ID NO: 8858 - DNA, 418 bp, Homo sapiens
  unsure (17): n=A,T,C or G
ctgttaaatacctcccngcatttttttttcctgatttaatattgctatgaacaggaaagtgtgtaaaagtaaaaagtgtatactatttacagatttaaagctttctttgaccttgtcaagggttaagcgactcatttgcatttagtataatgatatgcaaatcttttactttgatgtgtgaaacttctgctatctcaaattgacagtatcattattttcagctatgatcatccgtttaagtaaatgttcccataattttgaggtccagatacaaagtgtatttctatggaagcttagtccttggctgattttccatcatgagaagtcttcaggcagattagttataacttcaaagtactgagaaacagagccaagagataaggtcgagctctattgttccagtattctcgggatccag

SEQ ID NO: 8859 - DNA, 509 bp, Homo sapiens
  unsure (16): n=A,T,C or G
  unsure (17): n=A,T,C or G
  unsure (18): n=A,T,C or G
  unsure (461): n=A,T,C or G
gtggagaagagaaaannncagggcaggctggatggcatggctcacacctgtaatcccagcactttgggaggccatggagggaggattgaggccaggagtttgagaccagcctgggtgacattaaaagaccctgtctcaaagaaaacgaaaggagcagggtatatacaaggggtctgccagccttctcagcctttctgtgagaagcgagggtagggtagtacaggagagtggcaggaggtgacactaaaagtaggtctgtgttgatctaacgagtctcaactttactgccaaaactaatgaactaggaaagtttaggcagcaagggccagagatggagtctggacttgtattgcagaaagttcctgtgacggcagcttggagggtgaatgagagtgtgggatggaggggtgaatgggtgtggacagactggaaaaatgactcatgcagggaatgaggaaggnaggagccttgggagactctcaaatccctggcttagcctactgaattgc

SEQ ID NO: 8860 - DNA, 281 bp, Homo sapiens
  unsure (14): n=A,T,C or G
  unsure (15): n=A,T,C or G
  unsure (16): n=A,T,C or G
ctgctcggaggacnnntacagtgagctgctgcaggagatcacagacaacctgacgaagaaggagattcagatagagaagatccatttggacacgtcctccttcatggaggagctgcctggagagaaggaccttgcccacgtggtagagatctatgactttgaaccagcgctcaagacggaggacctgctggcaacgttttctgagttccaagagaaggggttcaggattcagtgggtggatgatactcgcgcactcggcatctttccctgccgggcctcag

SEQ ID NO: 8861 - DNA, 514 bp, Homo sapiens
  unsure (278): n=A,T,C or G
  unsure (448): n=A,T,C or G
  unsure (453): n=A,T,C or G
  unsure (454): n=A,T,C or G
  unsure (465): n=A,T,C or G
tccacatacaatatctgtgtaaaacgatttcctgtagaagtagctttaatggtttttgctctagaataccgtaggtctatccttagagcactcacgccatgctttcttccctgggttttaaacttcatataactttcagaaattggagagcaaaaattttgcttgtcactgcacatcaatataaaaaagcttatttaacttatcaaaacgtatttattgccaaactatgcttttttttgttaattttgttcatatttatcgggatgacaaatccatanaatatattcttttatgttaaattatgatcttcatattaatcttaaaattttgtgacgtgtctttttcctttttttccacagttttaatatattattcttcaacgacattttttgtaactttacacttttttggttattttattttaaaaaaatgaaaaattaatttaaanaaatnncaaaaaactgntggattatttattttagaaattcccccctttgtgttggactgcaaattg

SEQ ID NO: 8862 - DNA, 588 bp, Homo sapiens
gagcattttaaatagtacagtaggctggtatacattaggaaatggactgcactggaggcaaatagaaaactaaagaaattagataggctggaaatgcttactttctgctctcattttctttcattttgtctgctgtctttttgaatgccaatactttcatttaaaatgttttgggagcacggcaacccaaaatgactgaacggtggtccaaaaatccaaaccaactgataattacttctcgaggtgataggaaaggcacaggaagttaggactttggctgaaatgatgaaaacacatgttcgccattttagggatcagcgcctcgactcctgccacctccggctccaacgatgatcatgtttggatgtatttattgaattgtcctttgctgatgaggaatttttaaagtatttcatagaataagtcctttggtatgcagatgggttcatgcaggtaattttaggtatagcccatcttccatttcctaagcaccggatagttggaaggtgacgttgaatgaaaccatctttgcagtggtatctaatcagggagtttgatttcataacgaggtttcatctttccaaaggt

SEQ ID NO: 8863 - DNA, 132 bp, Homo sapiens
  unsure (8): n=A,T,C or G
  unsure (24): n=A,T,C or G
  unsure (35): n=A,T,C or G
  unsure (50): n=A,T,C or G
  unsure (90): n=A,T,C or G
  unsure (106): n=A,T,C or G
  unsure (116): n=A,T,C or G
  unsure (130): n=A,T,C or G
aaacttgnttattatgtacaaatngattcttatantattatttaaatgantgcatttttaaatacaaggctttatatttttaactttaanatgtttttatgtgctntccaaatttnttttactgtttctnga

SEQ ID NO: 8864 - DNA, 581 bp, Homo sapiens
  unsure (9): n=A,T,C or G
  unsure (18): n=A,T,C or G
  unsure (19): n=A,T,C or G
  unsure (20): n=A,T,C or G
  unsure (62): n=A,T,C or G
  unsure (107): n=A,T,C or G
  unsure (117): n=A,T,C or G
  unsure (125): n=A,T,C or G
  unsure (135): n=A,T,C or G
  unsure (141): n=A,T,C or G
  unsure (143): n=A,T,C or G
ctgtgaaanagccaaaannncccaaactaggctgatactcctgtgttgacctgaggtcattntgtgcctgtcaaaccaaataacacattcaatcttttgtatatttngaagactcanaaacccanaaatttttanaacctntntctcactctaattaaaacctactgctctgtcaatgggaaagaatgagtccaaacattctgaaaaccgtacaaatgtgtttacattttagtgggggcttcctgcatctttaacctctttaaattgacataggtaagatcttgtgtaataacacatttgcaaatatgcagatgcattttcaaatgaatataatcctgatttagagaatattaactgactatcatagtagactatggataatactctaataattaattacaggttaacatttttaaaactcaaagcatatgctttaagtttatgctttaagccacgttatgttctacttcagcctaatacaagggagaaatttggagggggccctcctagctttctagtctcattattcccaaattagaaacattaccagcctaacactaactctggggtctaaaatgaag

SEQ ID NO: 8865 - DNA, 498 bp, Homo sapiens
  unsure (17): n=A,T,C or G
  unsure (18): n=A,T,C or G
  unsure (455): n=A,T,C or G
  unsure (463): n=A,T,C or G
  unsure (487): n=A,T,C or G
  unsure (488): n=A,T,C or G
  unsure (489): n=A,T,C or G
ctgtgaggagattcccnntcagacaactttgctgaaagcagcttggaaattcggtgtcgaagggtctgccacgttttcatgcttgcattttgggctccaaattggcactgggaaggggttactgagagcacaaggctgataccaggccctacttttaaacgttcatctacttacaatcctagtatttctctaaaaaccaaaacctctttgaattaacagtttcatgctgtgaatttctagtgggagatcttttccttgatattgacgacacaattttccatgtacttttaaagcagggagtggggaaaagtattttgaggggacattttcatcatcagttcagctttttttttttggttgttgctcttttttgggggggttgggtttgttggtttcactgaaacatttaactacctgtaaaatctaaacatggctgttagtgtcacaccaattcnggacacanaatggctaacactggaagtatgtnnnagagttcca

SEQ ID NO: 8866 - DNA, 231 bp, Homo sapiens
  unsure (9): n=A,T,C or G
  unsure (17): n=A,T,C or G
  unsure (18): n=A,T,C or G
gaaaaacangatggagnnccagggcaaccccaaataccgcgccctctctgagcaaggcgtctgcaccctagagatccggaaacccagcccctttgattctggggtctacatctgcaaggccataaatgtgctgggggaggcatctgtggactgccggctggaggtcaaagcctcagccgcacactgaagagtcacgggaggaggctgtgatgaggagccaggtgctgcagg

SEQ ID NO: 8867 - DNA, 606 bp, Homo sapiens
  unsure (18): n=A,T,C or G
  unsure (556): n=A,T,C or G
cctaagaactgagacttncgacacaaggccaacgacctaagattagcccagggttgtagctggaagacctacaacccaaggatggaaggcccctgtcacaaagcctacctagatggatagaggacccaagcgaaaaaggtatctcaagactaaaggccggaatctggaggcccatgacccagaacccaggaaggatagaagcttgaagacctggggaaatcccaagatgagaaccctaaaccctacctcttttctattgtttacacttcttactcttagatatttccagttctcctgtttatctttaagcctgattcttttgagatgtactttttgatgttgccggttacctttagattgacagtattatgcctgggccagtcttgagccagctttaaatcacagcttttacctatttgttaggctatagtgttttgtaaacttctgtttctattcacatcttctccacttgagagagacaccaaaatccagtcagtatctaatctggcttttgttaacttccctcaggagcagacattcatataggtgatactgnatttcagtcctttcttttgaccccagaagccctagactgagaagataaaa

SEQ ID NO: 8868 - DNA, 550 bp, Homo sapiens
  unsure (18): n=A,T,C or G
ccacactctacttctgcntctgccacctatggggtcgaggcaggtgtggtgccttggctaagtccacagacttctgagaggcccacgctttcttcttctccagaaataaaccctgaaactcaagcagctttaatcagagggcaggattccacgatagcagcatcagaacagcaagtggcagcgagaattcttgattccaatgatcaggcaacagtaaaccctgtggaatttaatactgaggttgcaacaccaccattttcccttctggagacttctaatgaaacagatttcctgattggcattaatgaagagtcagtggaaggcacggcaatctatttaccaggacctgatcgctgcaaaatgaacccgtgccttaacggaggcacctgttatcctactgaaacttcctacgtatgcacctgtgtgccaggatacagcggagaccagtgtgaacttgattttgatgaatgtcactctaatccctgtcgtaatggagccacttgtgttgatggttttaacacattcaggtgcctctgccttccaagttatg

SEQ ID NO: 8869 - DNA, 580 bp, Homo sapiens
  unsure (16): n=A,T,C or G
  unsure (541): n=A,T,C or G
  unsure (549): n=A,T,C or G
  unsure (559): n=A,T,C or G
ctgccgttctcacacngctctacttagactcaatagcagcaccattaagtatctagactttgtctttgctgtgaaaaatgaaaaccgattttatctgaaggaagtgaacatcagcatgtatttggttaatggctccgttttcagcattgcaaataacaatctcagctactgggatgcccccctgggaagttcttatatgtgcaacaaagagcagactgtttcagtgtctggagcatttcagataaatacctttgatctaagggttcagcctttcaatgtgacacaaggaaagtattctacagcccaagagtgttcgctggatgatgacaccattctaatcccaattatagttggtgctggtctttcaggcttgattatcgttatagtgattgcttacgtaattggcagaagaaaaagttatgctggatatcagactctgtaacactaatcaatacgtgatctctgttacaaaagaaaaaagcaagtacaagttccaacatgcaatactggtcaacttaaggtatatttagttgcagtccanctctttanaatgggtggnatgggggatttcaaacttaaa

SEQ ID NO: 8870 - DNA, 312 bp, Homo sapiens
  unsure (14): n=A,T,C or G
  unsure (17): n=A,T,C or G
ctgttctcaacaanccnattttatttttttaatcaggcattgccagaaaattttgtacattaacctggaccagtgatggttctgtaccctctttgctgtgaaacacgacatgagctaaaggcaaagaccggttctcacaaggacaactgcttcaagttaggaaccagaacagtgcatttaaacagtcttcttagatattttcttgcctttcttaaaaaccagcttatttttaatgtagccacgcttccttttggtagtcttctttgacaaatacttctgttttgggaaaatgttggtgactcgaggtttgtg

SEQ ID NO: 8871 - DNA, 244 bp, Homo sapiens
  unsure (14): n=A,T,C or G
  unsure (70): n=A,T,C or G
cctgtctaacctcncctgtggagtctgcgtgggcatcgtgggcagtggggctgccctggccgatgctcanaaccccagcctctttgtaaagattctcatcgtggagatctttggcagcgccattggcctctttggggtcatcgtcgcaattcttcagacctccagagtgaagatgggtgactagatgatatgtgtgggtggggccgtgcctcacttttatttattgctggttttcctgggacag

SEQ ID NO: 8872 - DNA, 437 bp, Homo sapiens
  unsure (10): n=A,T,C or G
  unsure (18): n=A,T,C or G
  unsure (19): n=A,T,C or G
  unsure (21): n=A,T,C or G
  unsure (66): n=A,T,C or G
  unsure (72): n=A,T,C or G
  unsure (92): n=A,T,C or G
  unsure (150): n=A,T,C or G
cctcacgcanaaactagnncngttcatgaaaacccgagatactctgccagcttcttgaggaagcantgttgncacacttttctgagcttcantgattcacacattttgataagacagcatgttctgtgggttaagtacatttaccttttnaaaatatactcccatgaagtatcatggttcagaattacacacttacaaagttaaatggcataaaactactttgtaaaaagtgcctacactctaaaaggtgatttaaaggtttatgacatcttaattcaagtgaatactgaatcagtaggattatagagcaggtgctctaagttagggaatctggagtcagtctctcctttgcttatgtgcaatgtggacccagggatttctcaatttctctgtcagaatttttaacatggtaaaatggctattattatatggaatga

SEQ ID NO: 8873 - DNA, 363 bp, Homo sapiens
  unsure (19): n=A,T,C or G
  unsure (20): n=A,T,C or G
gccgccgcggactccggcnnctttatcgccagagtccctgaactctcgctttctttttaatcccctgcatcggatcaccggcgtgccccaccatgtcagacgcagccgtagacaccagctccgaaatcaccaccaaggacttaaaggagaagaaggaagttgtggaagaggcagaaaatggaagagacgcccctgctaacgggaatgctaatgaggaaaatggggagcaggaggctgacaatgaggtagacgaagaagaggaagaaggtggggaggaagaggaggaggaagaagaaggtgatggtgaggaagaggatggagatgaagatgaggaagctgagtcagctacgggcaagcgggcag

SEQ ID NO: 8874 - DNA, 537 bp, Homo sapiens
  unsure (414): n=A,T,C or G
  unsure (435): n=A,T,C or G
catcaagagatacttcaccctcaagtggttcagcagtttcttcatcaaaggtgttagacaaacccagtaggctaactgaaaaggaacttgctgaggctgcaagcaagtgggctgctgaaaagctagagaaatcagatgaaagtaacttgcctgaaatttctgagtatgaggcgggatccacagcaccattgtttactgaccagccagaggaacctgagtcaaacacaacacatgggatagaattatttgaagatagtcagctaaccactcgctctaaagcaatagcatcaaaaaccaaagagattgaacaggtttaccgacaagactgtgaaactttcgggatggtggtgaaaatgctgattgaaaaagatccttcattagaaaagtctatacagtttgcattgaggcagaatntacatgaaataggtgagcggngtgttgaagaactcaagcatttcattgcagagtatgatacttccactcaagattttggagagcctttttagattttttctgcttcaggctaaaaaaaaaaaa

SEQ ID NO: 8875 - DNA, 585 bp, Homo sapiens
  unsure (18): n=A,T,C or G
  unsure (19): n=A,T,C or G
ccacactctacttctgcnnctgccacctatggggtcgaggcaggtgtggtgccttggctaagtccacagacttctgagaggcccacgctttcttcttctccagaaataaaccctgaaactcaagcagctttaatcagagggcaggattccacgatagcagcatcagaacagcaagtggcagcgagaattcttgattccaatgatcaggcaacagtaaaccctgtggaatttaatactgaggttgcaacaccaccattttcccttctggagacttctaatgaaacagatttcctgattggcattaatgaagagtcagtggaaggcacggcaatctatttaccaggacctgatcgctgcaaaatgaacccgtgccttaacggaggcacctgttatcctactgaaacttcctacgtatgcacctgtgtgccaggatacagcggagaccagtgtgaacttgattttgatgaatgtcactctaatccctgtcgtaatggagccacttgtgttgatggttttaacacattcaggtgcctctgccttccaagttatgttggtgcactttgtgagcaaggataccgagacatg

SEQ ID NO: 8876 - DNA, 241 bp, Homo sapiens
ctggcccgacctctggccccctcttccctggctgaatgtaaatatttaccagcatttagaaaaaaggagaaaaaagacagaactaaacccgtttaggaaaaagggaccgagggacagcagtggttaagtaatccactgaggacctgaaggggaaaatggacttacctttctcatatacttggcctggctagggcactgggtgccagacagccttctgaggggattttctttctaaatgagg

SEQ ID NO: 8877 - DNA, 579 bp, Homo sapiens
  unsure (18): n=A,T,C or G
  unsure (19): n=A,T,C or G
  unsure (168): n=A,T,C or G
  unsure (169): n=A,T,C or G
  unsure (179): n=A,T,C or G
  unsure (182): n=A,T,C or G
tgaacatgtagtcacagnntcaccaatcaaaaaggaagaaagtacaaaacattttccgaaaggcatgagaccaacaattcaagagtcagatactgagctcttattctctggactgggatcaggagaagaagttttacctactctaccaacagagtcagtgaattttanntgaagtggancanatcaataacacattatatccccacacttctcaagtggaaagtacctcaagtgacaaaattgaagactttaacagaatggaaaatgtggcaaaagaagttggaccactcgtatctcaaacagacatctttgaaggtagtgggtcagtaaccagcacaacattaatagaaattttaattgacactggagcagaaggacccacggtggcacctctccctttctccacggacatcggacatcctcaaaatcagactgtcaggtgggcagaagaaatccagactagtagaccacaaaccataactgaacaagactctaacaagaattcttcaacagcagaaattaacgaaacaacaacctcatctactgattttctggctagagcttatggttttgaaatgg

SEQ ID NO: 8878 - DNA, 264 bp, Homo sapiens
  unsure (17): n=A,T,C or G
  unsure (19): n=A,T,C or G
ggctgctctgggattcncntcagccaatcttcattgctcaagtgtctgaagcagccatggcagaagtacctgagctcgccagtgaaatgatggcttattacagtggcaatgaggatgacttgttctttgaagctgatggccctaaacagatgaagtgctccttccaggacctggacctctgccctctggatggcggcatccagctacgaatctccgaccaccactacagcaagggcttcaggcaggccgcgtcagttgttgtgg

SEQ ID NO: 8879 - DNA, 428 bp, Homo sapiens
  unsure (15): n=A,T,C or G
  unsure (16): n=A,T,C or G
  unsure (18): n=A,T,C or G
ctgagcatccagatnncnagtccctgacactgtttaaccacacagtgagagctgccaaatgagaccagcagaaaaactgtccagctagccccaggtaatccatacagtcgtgacagatagacagatgtgtagttttaggccattaggttttgggataattggttaagcaacaataaataaccaaaacaaaacttaaagttatgacagtccaaataaaatttcctgaaagtcgaaagataagaaaatattccagaactgaaaatttaaaaaacatttagaaataacgtgagatataagactcaagacaagaggtctaaaatccaattaacagacacttccaaatgaacaaataaaatggaaaagagaaagttaacaacaaaaatatgacaagattcaagactccaactttgaaagagcctatccatagg

SEQ ID NO: 8880 - DNA, 328 bp, Homo sapiens
  unsure (9): n=A,T,C or G
  unsure (16): n=A,T,C or G
  unsure (22): n=A,T,C or G
  unsure (39): n=A,T,C or G
  unsure (81): n=A,T,C or G
  unsure (88): n=A,T,C or G
  unsure (95): n=A,T,C or G
  unsure (194): n=A,T,C or G
  unsure (261): n=A,T,C or G
  unsure (321): n=A,T,C or G
agatttgantatttancctgcncaaaggccaatcttcanttatcaatgacaagaaaactctagggctgccaaaataacttnattttanaccccanagttagtgttaggctggtaatgtttctaatttgggaataatgagactagaaagctaggagggccccctccaaatttctcccttgtattaggctgaagtngaacataacgtggcttaaagcataaacttaaagcatatgctttgagttttaaaaatgttaacctgtnattaattattagagtattatccatagtctactatgatagtcagttaatattctctaaatnagattat

SEQ ID NO: 8881 - DNA, 579 bp, Homo sapiens
  unsure (47): n=A,T,C or G
  unsure (84): n=A,T,C or G
  unsure (112): n=A,T,C or G
  unsure (470): n=A,T,C or G
tagagataggaacggtgggtggtgggaccaacctactacctcagcangcctgtttgcagatgctaggtgttcaaggagcatgcnaagataatcctggggaaaatgcccggcngcttgcccgaattgtgtgtgggaccgtaatggctggggaattgtcacttatggcagcattggcagcaggacatcttgtcaaaagtcacatgattcacaacaggtcgaagatcaatttacaagacctccaaggagcttgcaccaagaagacagcctgaatagcccgacagttctgaactggaacatgggcattgggttctaaaggactaacataaaatctgtgaattaaaaaagctcaatgcattgtcttgtggaggatgaatagatgtgatcactgagacagccacttggtttttggctctttcagagaggtctcaggttctttccatgcagactcctcagatctgaacacagtttantgctttacatgctgtgctctttgaagagatttcaacaagaatattgtatgttaaagcatcagagatggtaatctacagctcacctctgaaggcaaatataagctgggaa

SEQ ID NO: 8882 - DNA, 324 bp, Homo sapiens
  unsure (14): n=A,T,C or G
ctgggatccgccgnccagcgggcggttcagggctcccggtactcctgcgtgttaatgagaacgttcattagcgctcttgacaggacggcgactgtgagacgcctggttacctattttagtaaatcgggaacactggatgcaaggcggttggttttcgtttttaagcaagcttaaatgttggttacgctacttttggggaaagggaaacgaaaggtgaatctcgagttctaagttgctttctaagaaacccccaggatttaagagcgaaaactctctgcgacaaaacactggatacgcgagtcttaaatacagctctccaaacag

SEQ ID NO: 8883 - DNA, 599 bp, Homo sapiens
ctgttgccaagacagagattgctttaagtggcaaatcacctttattagcagctacttttgcttactgggacaatattcttggtcctagagtaaggcacatttgggctccaaagacagaacaggtacttctcagtgatggagaaataacttttcttgccaaccacactctaaatggagaaatccttcgaaatgcagagagtggtgctatagatgtaaagttttttgtcttgtctgaaaagggagtgattattgtttcattaatctttgatggaaactggaatggggatcgcagcacatatggactatcaattatacttccacagacagaacttagtttctacctcccacttcatagagtgtgtgttgatagattaacacatataatccggaaaggaagaatatggatgcataaggaaagacaagaaaatgtccagaagattatcttagaaggcacagagagaatggaagatcagggtcagagtattattccaatgcttactggagaagtgattcctgtaatggaactgctttcatctatgaaatcacacagtgttcctgaagaaatagatatagctgatacagtactcaatgatgatgat

SEQ ID NO: 8884 - DNA, 608 bp, Homo sapiens
  unsure (579): n=A,T,C or G
ccttattttctgagccaaccgaggcaggagacactacaacacaaaaaaatgtgaaccacagagaccaccaagtacaaaaactgcaaactcataagcattaaaaaacattgggtggaactggttagagcacattagaataatttaccagaacttgtgcagagaaaagaatgaagactggtggggaataattgacaggttctgctcccccagcttaactatcattgtgaaggttaaaataaaagaagatatgaagctctagcataataaagaacacagcagaggctatatataaaaaagttaacataaaaatctgacaggtgaaggaatagaatatcctgggaaaagcaagaactacttactaaaacctttgtttttccacttggaatctgcatacttatattgaactaataaagtattgctatgaacaaactagtagaatgaattattttaacttctcaagaccctgatatagagctatccattttgcattctaaaccctctccaggctaattgacaaaggataataccagaaatagatcaggagttaaattatagttagaaaggggagagaagtaaggnaggacattaaaattttattctgaaattat

SEQ ID NO: 8885 - DNA, 314 bp, Homo sapiens
  unsure (14): n=A,T,C or G
  unsure (70): n=A,T,C or G
  unsure (71): n=A,T,C or G
gggaaccaaagctntcatggatgaggtggtgaaagccacttctaggggctgcatcaccatcataggtggnngagacactgccacttgctgtgccaaatggaacacggaggataaagtcagccatgtgagcactgggggtggtgccagtttggagctcctggaaggtaaagtccttcctggggtggatgctttcagcaatatttagtactttcctgccttttagttcctgtgcacagcccctaagtcaacttagcattttctgcatctccacttggcattagctaaaaccttccatgtcaagattcagctagtgg

SEQ ID NO: 8886 - DNA, 608 bp, Homo sapiens
gttggtaaagaatacaggagcagaaccgggcatggtggctcagcctgtaattccagcactttgggaggctgaagtgggcagatcacttgaggtcaggagattgagaccagcctggctaacatggtgaaaacctgtctctactaaaaatacaaaaattagctgggtgtggtggcatgcacctgtaatcccagctatttgggaggctgaggcaggagaattgctcaaaataaaaaaaaaaaaataaagaactaaaaagtgtggatactgttatgccacatgtgataataaaatattcaaggccacagatgcaagtcaccaacttacaaagagaatactgaaggtagggtacattaaaaaaatagagaaatgcaataaagaaaatgccacctctgcctaaatcaggaaagagtaaatgcataggcattaaaacagcagctctgcatactacactgcatttctctttgtcaaaaagaattcactgtgtatcattacaaaggtcagtgaataagacgaggcaataaacgtagcgccttggtattagggcaaatttagttttcttttcattttacacatgagggggaaaaaagaagtgtagaactaggaatgct

SEQ ID NO: 8887 - DNA, 592 bp, Homo sapiens
  unsure (515): n=A,T,C or G
actgccttgaagaaaaaggaccaatgttcgaactacttccaggtgaatccaacaagatcccccgtctgaggactgacctttttccaaagacgagaatccaggacttgaatcgtatcttcccactttctgaggactactctggatcaggcttcggctccggctccggctctggatcaggatctgggagtggcttcctaacggaaatggaacaggattaccaactagtagacgaaagtgatgctttccatgacaaccttaggtctcttgacaggaatctgccctcagacagccaggacttgggtcaacatggattagaagaggattttatgttataaaagaggattttcccaccttgacaccaggcaatgtagttagcatattttatgtaccatggttatatgattaatcttgggacaaagaattttatagaaatttttaaacatctgaaaaagaagcttaagttttatcatcctttttttctcatgaattcttaaaggattatgctttaatgctgntatctatcttattgttcttgaaaatacctgcattttttggtatcatgttcaaccaacatcattatgaaattaattag

SEQ ID NO: 8888 - DNA, 570 bp, Homo sapiens
accacatcatcctcacgtgttcggtactgagcagccactacccctgatgagaacagtatgaagaaagggggctgttggagtcccagaattgctgacagcagaggctttgctgctgtgaatcccacctgccaccagcctgcagcacaccccacagccaagtagaggcgaaagcagtggctcatcctacctgttaggagcaggtagggcttgtactcactttaatttgaatcttatcaacttactcataaagggacaggctagctagctgtgttagaagtagcaatgacaatgaccaaggactgctacacctctgattacaattctgatgtgaaaaagatggtgtttggctcttatagagcctgtgtgaaaggcccatggatcagctcttcctgtgtttgtaatttaatgctgctacaagatgtttctgtttcttagattctgaccatgactcataagcttcttgtcattcttcattgcttgtttgtggtcacagatgcacaacactcctccagtcttgtgggggcagcttttgggaagtctcagcagctcttctggctgtgttgtcagcac

SEQ ID NO: 8889 - DNA, 470 bp, Homo sapiens
  unsure (173): n=A,T,C or G
  unsure (182): n=A,T,C or G
  unsure (189): n=A,T,C or G
  unsure (203): n=A,T,C or G
  unsure (204): n=A,T,C or G
  unsure (236): n=A,T,C or G
  unsure (252): n=A,T,C or G
  unsure (260): n=A,T,C or G
  unsure (313): n=A,T,C or G
  unsure (404): n=A,T,C or G
  unsure (419): n=A,T,C or G
tatcttcccactttctgaggactactctggatcaggcttcggctccggctccggctctggatcaggatctgggagtggcttcctaacggaaatggaacaggattaccaactagtagacgaaagtgatgctttccatgacaaccttaggtctcttgacaggaatctgccctcanacagccagnacttggntcaacatggattannaagaggattttatgttataaaagaggattttnccaccttgacaccagncaatgtanttagcatattttatgtaccatggttatatgattaatcttgggacaaagaattntatagaaatttttaaacatctgaaaaagaagcttaagttttatcatcctttttttctcatgaattcttaaaggattatgctttaatgctgntatctatcttattgnttcttgaaaatacctgcattttttggtatcatgttcaaccaacatcattat

SEQ ID NO: 8890 - DNA, 295 bp, Homo sapiens
ttttaaatattttattttcctgttctttgtgaaaacatcaataaatatcgaaacctctctgctctaacacagagggaaacactgcataattaacattaaacaaggcagtatgccttacaagaaagacataaaatgtccaagggatatttagaacattttagttcttaaagcttcaacatgagaaatgttgaccacacactgtgaaatcatttcaataaataacaactgacattcatctttacagttacaaaatagacacacatacatttccctgccgtcacattgatcttactgg

SEQ ID NO: 8891 - DNA, 527 bp, Homo sapiens
ttaagaacatcactcttttaagagcctccaaaaatcaggagattcaggtaagtgtcctatcaagatttatcactgataagtctagatcatcatgaagtacattggaaaggcaacaggaagcaaagtaagcccgaagattctaagggaagcaactcctttctacataggcatttaaggcatttactgctagcaagctttccctaggaaactgaaaaagagatttaacgtccatcaaaagtaaaggaagaactttctcctggtgtggcagaagtatgtgtttttaattagtcattgattagaagtattggtatcaagatggaaatgatgatgattttcaatttcaaggaagagattatattcctcatatgtattctgccaacaggttttgttttttaaaatattttgaacagaaaatataattcataaacttaatcctctaaaaatcacaataggaagtcagctaaactaactctaatccaaccattctagtatatactatccaagggctgaagtgtcaggcaatgact

SEQ ID NO: 8892 - DNA, 604 bp, Homo sapiens
ccacgaagcaccgccaggacagttttcaaggaagagaaagtaaagggtctccaaagaagcggctggatgtccgtctgtcgagaacgtccagcgtggagcggggcaaggagagggaggaggcttggagctttgacggggcattggagaacaagcgaactgccgctaaggaatctgaggagaacaaggagaacctgatcataaattctgaactcaaagacgacttgcttttgtatcaggacgaggaggcgctgaacgactccattatttctggaacactgccacggaaatgcaagaaggagctcctggccgtgaagctaaggaaccggccaagcaaacaggaactagaagaccggaacattttccccagaaggactgatgaagaaagacaggagatccggcagcagatcgagatgaagctttccaaacggctgagccaaagacctgccgtggaagagctggagagaagaaatatcttgaaacaaaggaatgatcagacagagcaggaagaaagaagagaaatcaagcaaagattgacaagaaagcttaatcagagacccactgttgatgaattaagagacagaaaaattctgatacgattcagtga

SEQ ID NO: 8893 - DNA, 270 bp, Homo sapiens
  unsure (33): n=A,T,C or G
  unsure (37): n=A,T,C or G
  unsure (54): n=A,T,C or G
  unsure (84): n=A,T,C or G
  unsure (148): n=A,T,C or G
  unsure (159): n=A,T,C or G
  unsure (171): n=A,T,C or G
  unsure (183): n=A,T,C or G
  unsure (190): n=A,T,C or G
  unsure (233): n=A,T,C or G
  unsure (241): n=A,T,C or G
  unsure (243): n=A,T,C or G
  unsure (246): n=A,T,C or G
tcgacattctttttgttactgatacgtttaatngttntgtttgtaaggttccanaatatcttaaccatgtaagtaaacgcttanaggaagagggagacagagtaatcacttacttggaccacagcacacagtaagtaccgtttgctcnctgagcgttcntatcttcaccgnggctggaaggtnctcctgnctggttattgaaataaagggtgtctttgtcaattcattcagtnctaagagngnttntgcacctagcatattttactttgt

SEQ ID NO: 8894 - DNA, 597 bp, Homo sapiens
ccatccctggcactgagcccatgctgttcatctggacagagtggttcattggggaggctgcacgaggtcccatgggtgcttgtggcaactggacgttccccaaggacatggggttaaatgaattcatcccttgagaaacttgcatgcgattcactggcagggacaggggtccatttggaggtctcacaggttgtgcctgtggaatcacagggggctgagcccccggggctggtaaggctggctggttccccaagatgccttgtttatgtaaacgcgacctccgtttttcttctagttctttttgtatcttgtagattttctctgctaataagtgataatattcatccctgctgttggcagactcgtacatgtccccttccactttcttagcataggctaccaggttttccatgcggcgatcctttagagctgcgggatcaggtgttgggaagatggcttggacgagtttatgcactagatggctccgcaggtcctgagtgacatgttcgtgccagcctttccttacaccggtgctagaaggaggagctgctgttggtatagtgctgagggttccaatgttaccagagttggagccat

SEQ ID NO: 8895 - DNA, 435 bp, Homo sapiens
ccttcccactctttgtagtgccaggaaaatactgaatgtaagtgggtgcagctttgctcgctgtgaggagcagcagaatgcggcagcctctcctcccagaatctaggaatctgggaggcacaggacatccccaaaaggtcccaaacagttccagaccctatgtcttaccctccaccctaccagggaatgactatctacactaatgaagggctactgcccccatggctgaagccacagaatggtacaggagagaagactgtaatttgtgaccagaaacaggcaagctgtccctcccagccccaaagaatgggaacctgcccaccagtggcaccagggctgggggctaggagagatggcatccatcaaggagcccttaagaggctgcatctttaaggaccaggaaatgagtccatcagttaccaaggcttctcacag

SEQ ID NO: 8896 - DNA, 384 bp, Homo sapiens
  unsure (9): n=A,T,C or G
  unsure (71): n=A,T,C or G
  unsure (292): n=A,T,C or G
ctggtgcancttgcctcaatatcttatcactaagtgcattcctggacctgctttgagtcagtttacactanttatgcaattaagggtggaaggtaaagggggctgcacgtgaagaaactaaaatggagtctgtccggctctctctccgctaggagagagtcactcaggttaaaacaaggtagggtatcacaggaccatgtacaattcttcaaactccagcttcaactctctttcttattgctctcttaggacagtatatttagatcagagtaaatgaaagtaatgttattangagataagattaaaattgatcccatttgtaaaaagggaagtagattatttgtgaactgtaatactttttttactgaagaatcaccttaaaac

SEQ ID NO: 8897 - DNA, 593 bp, Homo sapiens
ctgactgactttgggcaaattccttcctctttccagatgccagtttctcaacaataaagtgagggagctttgctccgatttccctccttctcttactgcctaaacttgtcagatagaacttcaagtttgcttcaccttaggtcctgattgccaccacagtggggacagcagggacggtccccaagcctgaagcaagaagaggacagagaaggatgaactgcaggagactttgcctaagcagaaatccaaaccccatttttccctaaagatgaggcatcttacttcaaggacatttgtcaagttgttaaagttcccttgatggtctctcagaagccctggaacttctggaaatcacttgaactgtgataagaattctccttagagctgcctgagaatagcaggacacggcaggcgaggagggggagtcacctgctgccttaatcctctcagacagaaatgaaatttctcccaccgaagggtttccttgggcttcagggagctcacaaagctgcttgctagaaagaatatttagtccaagctgggaggagtggtgattttgataagaaaatcaagagccccattcacgttcccag

SEQ ID NO: 8898 - DNA, 600 bp, Homo sapiens
  unsure (572): n=A,T,C or G
ccatcttcccatctcccatgatgtatgctggaccaactgaggtccagtggcattgcagagcacggatggttgcaggagccaacttttacattgttggacgagaccctgctggcatgcctcatccagaaacagggaaggatctttatgagccaagtcatggtgccaaagtgctgacgatggcccctggtttaatcactttggaaatagttccctttcgagttgcagcttacaacaagaaaaagaagcgtatggactactatgactctgaacaccatgaagactttgaatttatttcaggaacacgaatgcgcaaacttgctcgagaaggccagaaaccacctgaaggtttcatggctcccaaggcttggaccgtgctgacagaatactacaaatccttggagaaagcttaggctgttaacccagtcactccacctttgacacattactagtaacaagaggggaccacatagtctctgttgacatttctttgtggtgtctgtctggacatgcttcctaaaaacagaccattttccttaacttgcatcagttttggtctgccttatgagttctgntttgaacaagtgtaacacactgatggtt

SEQ ID NO: 8899 - DNA, 595 bp, Homo sapiens
  unsure (8): n=A,T,C or G
cctcctcnaccaaggcagggaacttcaatctgtataagtatctgcagttgctggaataatttgaagaccccatggagctaaggagattaagtggaggattttcattgtttcagaggggcaaggggcaaatccattgctaattctttaatgatgaaaaatggtaagaagttgttaaactcctttggggattttaaaaagtgatacgtaaacagaagagagagagagagagagaaatcacagtagtgaggctaacaaaaataatgataaaaaggttagaagaacccaggatacttagtggatgcctagacaacataaaaatagatttatagaaggaagcaatggaatttgaatataaaagggtatcagaaagttaatgtgttgcatctgaaattcaaagtatttccttttggctacacaagaaagacttttaataaaaccctttgtatatatttctgaaaggtaaatattttatagggaaatggaggattggaagaaaatctgttccatcatgtctgggtattagaattttgcttaataacttgccaaaatattacgcttccaagggctatggcattatgtgtgtacccaattaaag

SEQ ID NO: 8900 - DNA, 606 bp, Homo sapiens
  unsure (517): n=A,T,C or G
ctgtcaccaggccagaaacaaaaagaagagcctaaggaagtgaagctcagtgttcccatgccctacacactcaaggtgcactacaagtacacggtagtcatgaagactcagcccgggctcccctacagccaggtccgggacatggtgtctaagaaactggagctccggctggaacacactaagctgagctatcggcctcgggacagcaatgagctggtgcccctttcagaagacagcatgaaggatgcctggggccaggtgaaaaactactgcctgactctgtggtgtgagaacacagtgggtgaccaaggctttccagatgaacccaaggaaagtgaaaaagctgatgctaataaccagacaacagaacctcagcttaagaaaggcagccaagtggaggcactcttcagttatgaggctacccaaccagaggacctggagtttcaggaaggggatataatcctggtgttatcaaaggtgaatgaagaatggctggaaggggagtgcaaagggaaangtgggcattttccccaaagtttttgttgaagactgcgcaactacagatttggaaagcactcggagagaagtctaggatgtttcacaaac

SEQ ID NO: 8901 - DNA, 95 bp, Homo sapiens
  unsure (8): n=A,T,C or G
  unsure (20): n=A,T,C or G
  unsure (88): n=A,T,C or G
ctggtttntaattctaatantataaaaattggaaatttgaaatagttctgtaaaagaaaaaaatgtaaaaatacatctgctttctctnatggttt

SEQ ID NO: 8902 - DNA, 448 bp, Homo sapiens
ctggagagtgtagatcccaaaattacccaaagaagaagatggaaaagcgatttgtcttcaacaagatagaaatcaataacaagctggaatttgagtctgcccagttccccaactggtacatcagcacctctcaagcagaaaacatgcccgtcttcctgggagggaccaaaggcggccaggatataactgacttcaccatgcaatttgtgtcttcctaaagagagctgtacccagagagtcctgtgctgaatgtggactcaatccctagggctggcagaaagggaacagaaaggtttttgagtacggctatagcctggactttcctgttgtctacaccaatgcccaactgcctgccttagggtagtgctaagaggatctcctgtccatcagccaggacagtcagctctctcctttcagggccaatccccagcccttttgttgagccagg

SEQ ID NO: 8903 - DNA, 603 bp, Homo sapiens
  unsure (477): n=A,T,C or G
cctttattgatttaattttcctttcaacttatcaatgctatcacaaattctaaggaaacaggacttgggcaaaattttttattatgaagatacagatctaagaacagaaggataattatgtgctagcttatatatagttccttgtaaaaataatgatacatgaaaaattagtagaaaatgaaaatctgcagttatctgatatctgaaaatgttaagcaatttcccctgcatcttagttctaatcacttttgcagaataatcaagcatatttgggtgaagagagtatttaatgattccatttttattaatagtgtagtgtgcccttcagagcttggcgtagtctttaagaatcatctgaagtttctggctcagcatgatgttccctctggccttcagcctgccactaaagaatgccttctgagggtcaagcttgcccaggaccacctccatgaaatcttcatctgaaagtatgattgntgtatcagcagcaccttttgcagggccttggtacacttttccagaaccacttttcaggtcaatagtccacttagccccaatatttccgcctttggttatatgccactcaaatacagcatttacacc

SEQ ID NO: 8904 - DNA, 324 bp, Homo sapiens
cctgtatagaacaacaatttgattctctcaatggaggagtatctgtgtcaaaaaatagtacttttgctgaggaatttgcacatagtattcggtcaatttttgcaaatgtagaagccaaacttggagaaccttctgaaattgaccagagagacaagtatgttggaatttgtggactctttgtattgcactttcagatttttcgaactattgataaaaagttttataagtctttattggacatttgtaagaaggtaccagccatcactctaactgctaatattatttggtttcctgataattttctgatccagaaaataccagcag

SEQ ID NO: 8905 - DNA, 200 bp, Homo sapiens
tgtgtctaggaaatagggcaggagtgggcgctgaggaggagtatgtcctcccagttaccttgagatctgccacagtgaggtttctatggcataccagagaatggaaagaagattaggttggcacttcctacttctgataccatcttcacggcttcattaggtgcccccaatttccacagaatctgaagttctgggcaagg

SEQ ID NO: 8906 - DNA, 564 bp, Homo sapiens
  unsure (191): n=A,T,C or G
ctgcttgcacaaatggatgttagtatgggaggaagagtggcagaggagcttatatttggaaccgaccatattacaacaggtgcttccagtgattttgataatgccactaaaatagcaaagcggatggttaccaaatttggaatgagtgaaaagcttggagttatgacctacagtgatacagggaaactaantccagaaacccaatctgccatcgaacaagaaataagaatccttctaagggactcatatgaacgagcaaaacatatcttgaaaactcatgcaaaggagcataagaatctcgcagaagctttactgacctatgagactttggatgccaaagagattcaaattgttcttgaggggaaaaagttggaagtgagatgataactctcttgatatggatgcttgctggttttattgcaagaatataagtagcattgcagtagtctacttttacaacgctttcccctcattcttgatgtggtgtaattgaagggtgtgaaatgctttgtcaatcatttgtcacatttatccagtttgggttattctcattatgacacctat

SEQ ID NO: 8907 - DNA, 593 bp, Homo sapiens
caggagggttgtctggagccaccaggttgcaatttgaggcagcagtagtgagggaaatggtatgagaagatttgtagatgttatgaggcagcatcttttgtgacatattttctcattttaggttttgaaaatagtgaagtactccctgaaaacacacaccaaataatgaactataaaaatacttggattatgaatatattttagtggcttctcttttctttttattataatgtatttttttctcatgcatactccatatcttgcttgtgttcaagcatactttaatttttaattcatcagttaagctgtctttgagttaccatgatattgggcatacctcattattttttacaccaaatgcattttaaaaaggaaaaaggacactgttttatcttctttcttgctgctttaatgaggatggagggataagttacaggctggcacattaaatgtactactatggaaggacctttttctttatcagtgtcccttccctacccttaaaatcactgatcagggtctagcagtatctgctcctcaaaacttgggaccaagtgatggtgttcccacttgcaatgtcctctcatagcact

SEQ ID NO: 8908 - DNA, 381 bp, Homo sapiens
ctcagtgttcatcagtgaagcgttctgggcacggccatgcccggctttcacatgttgtctgtgctgttctcactccagtgggagagcggagtagtcgccacagagagcacctggcccgcacagcctgttctgcattttacagaagtttcccaactcttgctttgttacatgcaaagtctagaaaggataaatgcaaaatattagcaggtgatgttgtgaagtttcctttttcttttcttttttttttttcctccttgatagagtgtcactctgtcacccaggctggagtgccgggcgtggtagttgacgcctgtaatcccagcagtttgggaggccgaggaggatggatcacctgaggtcagaagttcgaaaccagcctgg

SEQ ID NO: 8909 - DNA, 603 bp, Homo sapiens
ctggaggtgtaatagtgcgggtagtgggtttggagaagttccgaggcggcggtggcgccggtcaggacaaggatagcggaaccgggccctgggcttgtcgctcaccatgccgacagtagaggagctttaccgcaattatggcatcctggccgatgccacggagcaagtgggccagcataaagatgcctatcaagtgatattggatggtgtgaaaggtggtactaaggaaaagcgattagcagctcaatttattccgaaattctttaagcattttccagaattggctgattctgctatcaatgcacagttagacctctgtgaggatgaagatgtatctattcgacgtcaagcaattaaagaactgcctcaatttgccactggagaaaatcttcctcgagtggcagatatactaacgcaacttttgcagacagatgactctgcagaatttaacctagtgaacaatgccctattaagtatatttaaaatggatgcaaaagggactttaggtgggttgttcagccaaatacttcaaggagaggacattgttagagaacgagcaattaaattcctttctacaaaacttaagactttaccagatgaagt

SEQ ID NO: 8910 - DNA, 549 bp, Homo sapiens
cactaaagcatagtacgtggatgtcagtgagacagcatgagagccagcagtcatcaaagcgttccacgtttgaagttagcaactgcttaaagttatgccctattaaaattgctttctcaaaagtttgggttagtttcaaatgtgatattttggagggaaggtaaagtaggtatctttcaggtcgtgataatgagctcctatgaaaggatgcaatataatgacccgcttttctagaaagttcataatcagctctggaacaagcacacttgattcctcactgtgcttcagaatgagattaagatcagatgttggaacgtgctatgctgtagcgtgtctggaaacaaagtacacaaacctggctacggtgatgagttagcttctgcttactacctgtgacaacccaagtgggtgacactagtgaaccttctccagtctgcaggctggcatagaaggctcttagattatattgggcagcttgcaatctgccgaagcagtgacttgcatttccacacttggcttgagcactcaacccagaaggcgaagatagct

SEQ ID NO: 8911 - DNA, 437 bp, Homo sapiens
ccttaattttctgttcatggactgttaaaagtaaaaccaaactttcaaaagggataaacctaaatatttacttgttatcattagagagggaacatcaaatgctgggacatcattactaaccaatagcatcagacactggatttaatggataatcacaatggtcgtaatgtatacagacatatataccacgttctagtataaatttttcaaaaaatacaataataatataatttataaagaacactcttctatgaacaaccaccaccaccaaaaaagaaaaagccctcagaaaatttctcacaaataaggcaactaatgcctgatatctcaaaatcctttacaaaaggagatagttctagtcaaggagttttgggtatgttacttttttttcttctttttcttttcatctgcctccatcttaagtgcaatttcttcag

SEQ ID NO: 8912 - DNA, 595 bp, Homo sapiens
  unsure (84): n=A,T,C or G
  unsure (130): n=A,T,C or G
  unsure (139): n=A,T,C or G
  unsure (149): n=A,T,C or G
  unsure (155): n=A,T,C or G
  unsure (165): n=A,T,C or G
  unsure (170): n=A,T,C or G
  unsure (172): n=A,T,C or G
cctacttcacaaagcgccttcccccgtaaatgatatcatctcaacttagtattatacccacatccacccaagaacagggtttanaaaaaaaaaaaaaaaaaaaaaaaaaaagcttgtacaaaaaatgggngcgctgcantccagacagnaatttntgcaaactgncttgnanaaaaaggaccaatgttcgaactacttccaggtgaatccaacaagatcccccgtctgaggactgacctttttccaaagacgagaatccaggacttgaatcgtatcttcccactttctgaggactactctggatcaggcttcggctccggctccggctctggatcaggatctgggagtggcttcctaacggaaatggaacaggattaccaactagtagacgaaagtgatgctttccatgacaaccttaggtctcttgacaggaatctgccctcagacagccaggacttgggtcaacatggattagaagaggattttatgttataaaagaggattttcccaccttgacaccaggcaatgtagttagcatattttatgtaccatggttatatgattaatcttgggacaaagaattttatagaaattt

SEQ ID NO: 8913 - DNA, 597 bp, Homo sapiens
ccaaaagaagtaagacagcttgctgaagatttcctgaaagactatattcatataaacattggtgcacttgaactgagtgcaaaccacaacattcttcagattgtggatgtgtgtcatgacgtagaaaaggatgaaaaacttattcgtctaatggaagagatcatgagtgagaaggagaataaaaccattgtttttgtggaaaccaaaagaagatgtgatgagcttaccagaaaaatgaggagagatgggtggcctgccatgggtatccatggtgacaagagtcaacaagagcgtgactgggttctaaatgaattcaaacatggaaaagctcctattctgattgctacagatgtggcctccagagggctagatgtggaagatgtgaaatttgtcatcaattatgactaccctaactcctcagaggattatattcatcgaattggaagaactgctcgcagtaccaaaacaggcacagcatacactttctttacacctaataacataaagcaagtgagcgaccttatctctgtgcttcgtgaagctaatcaagcaattaatcccaagttgcttcagttggtcgaagacagaggtgcaggt

SEQ ID NO: 8914 - DNA, 576 bp, Homo sapiens; identical to SEQ ID NO: 8798

SEQ ID NO: 8915 - DNA, 435 bp, Homo sapiens
ctggagcccttccctgagaaactcttacaggccaggaagccagtacagatctttgagaggtctgtgtacagtgacaggctccactttgaggctctgatgaacattccagtgctggtgttggatgtcaatgatgatttttctgaggaagtaaccaaacaagaagacctcatgagagaggtaaacacctttgtaaagaatctgtaaccaataccatgaagttcaggctgtgatctgggctccctgactttctgaagctagaaaaatgttgtgtctcccaaccacctttccatccccagcccctctcatccctggagcactctgccgctcaagagctggtttgttaattattgttagactttgccattgttttcttttgtacctgaagcattttgaaaataaagtttacttaagttatgcttgtttttctaaaaaaaa

SEQ ID NO: 8916 - DNA, 450 bp, Homo sapiens
  unsure (438): n=A,T,C or G
gctgcctgtatctttcatttttaaaatagcacttgagttattttctgagtaatccaataaagaacttttgatgacagccagaatgtgttagaactctggctgaacatttcatctcctgtgagtcagaagggctttatttctccctttgatggggccccttcttctttctggtgctctggaagttgtttagaggaaagaattctaattttaattaattgcgcagtgagttaatctcactcgcttttctgcttccaggcatcttaggaaaaacaaatggttttagtagataagggatgcctactaatgcttttttaaaacaaacagggacatttttattatagatttgatttttttaatgaatgtttttaaaaatatataaataggacaccaaagcggcagggttttttttggggggagggggtttgttttccaactcangatggcacatta

SEQ ID NO: 8917 - DNA, 605 bp, Homo sapiens
  unsure (589): n=A,T,C or G
ccttggtcctagcacccactcgagaattggctcagcagatacagaaggtggtcatggcactaggagactacatgggcgcctcctgtcacgcctgtatcgggggcaccaacgtgcgtgctgaggtgcagaaactgcagatggaagctccccacatcatcgtgggtacccctggccgtgtgtttgatatgcttaaccggagatacctgtcccccaaatacatcaagatgtttgtactggatgaagctgacgaaatgttaagccgtggattcaaggaccagatctatgacatattccaaaagctcaacagcaacacccaggtagttttgctgtcagccacaatgccttctgatgtgcttgaggtgaccaagaagttcatgagggaccccattcggattcttgtcaagaaggaagagttgaccctggagggtatccgccagttctacatcaacgtggaacgagaggagtggaagctggacacactatgtgacttgtatgaaaccctgaccatcacccaggcagtcatcttcatcaacacccggaggaaggtggactggctcaccgagaagatgcatgctcgagatttcactgnatccgccatgcatgga

SEQ ID NO: 8918 - DNA, 597 bp, Homo sapiens
  unsure (372): n=A,T,C or G
  unsure (457): n=A,T,C or G
  unsure (521): n=A,T,C or G
ccaacattgcgaaaccctgtctctactaaaaaaaaaaaataaaaaatacaaaaattagctgggtatgatggcacatgcctctaatcccagctactgggaggctgaggcatgagaatcgcttaaacctgggaggcgggtttgcagtgagccaagatagcaccactgcactccagcctgggtaacagattgagactctgtcaaaaaaaaaaaaagatgttaaaggaaaaatctgaggcgcaattcatgaagtttagtgttccagtggcaaaatgtcacaggcaagtatttattgggaaaatgtggaagcaaaataaaggcaatcggttggttttcaattacataattgttttttgggggtaggtatcttcttanaaagtccctagtcacctaattatatgttagtaggctgcttgtgattggctggggttgtcttatttctaacataagcatttaccanaaatgatccaagttaagttttgcttatgcttgtatgtagtatgaccccgtgaagttttgcttgngtttgtagtttaagcaaagttaaagctatttctaagggccaggtggttttgtttgctcaggatttttccagtctcc

SEQ ID NO: 8919 - DNA, 570 bp, Homo sapiens
  unsure (26): n=A,T,C or G
  unsure (93): n=A,T,C or G
  unsure (98): n=A,T,C or G
  unsure (144): n=A,T,C or G
  unsure (383): n=A,T,C or G
  unsure (384): n=A,T,C or G
  unsure (387): n=A,T,C or G
  unsure (530): n=A,T,C or G
gctagactaagttggtcatgatgcanaagctactcaaatgcagtcggcttgtcctggctcttgccctcatcctggttctggaatcctcagttnaaggntatcctacgcagagagccaggtaccaatgggtgcgctgcaatccanacagtaattctgcaaactgccttgaagaaaaaggaccaatgttcgaactacttccaggtgaatccaacaagatcccccgtctgaggactgacctttttccaaagacgagaatccaggacttgaatcgtatcttcccactttctgaggactactctggatcaggcttcggctccggctccggctctggatcaggatctgggagtggcttcctaacggaaatggaacaggattaccaactnntanacgaaagtgatgctttccatgacaaccttaggtctcttgacaggaatctgccctcagacagccaggacttgggtcaacatggattagaagaggattttatgttataaaagaggattttcccaccttgacaccaggcaatgtanttagcatattttatgtaccatgggtatatgattaatcttg

SEQ ID NO: 8920 - DNA, 225 bp, Homo sapiens
cctttcctctgcaggttggagaacacagcgcgcgaccatgaacgcttccttttgtacgtctgcggcatggtgtccttcgtgagcacagcatagggacctggaaacgtgtcttggaactgatgctgaactgaatttcttgggttcgagtttaagggactctggattgcagaagcctcgttaatgggatctagagatgcgaagaactggccggccgagggctgcagg

SEQ ID NO: 8921 - DNA, 600 bp, Homo sapiens
  unsure (3): n=A,T,C or G
  unsure (43): n=A,T,C or G
  unsure (77): n=A,T,C or G
  unsure (102): n=A,T,C or G
  unsure (221): n=A,T,C or G
  unsure (316): n=A,T,C or G
  unsure (419): n=A,T,C or G
  unsure (570): n=A,T,C or G
canagagccaggtaccaatgggtgcgctgcaatccagacagtnattctgcaaactgccttgaagaaaaaggaccaantgttcgaactacttccaggtgaatncaacaagatcccccgtctgaggactgacctttttccaaagacgagaatccaggacttgaatcgtatcttcccactttctgaggactactctggatcaggcttcggctccggctccggcntctggatcaggatctgggagtggcttcctaacggaaatggaacaggattaccaactagtagacgaaagtgatgctttccatgacaaccttaggtntcttgacaggaatctgccctcagacagccaggacttgggtcaacatggattagaagaggattttatgttataaaagaggattttcccaccttgacaccaggcnatgtagttagcatattttatgtaccatggttatatgattaatcttgggacaaagaattttatagaaatttttaaacatctgaaaaagaagcttaagttttatcatccttttttttctcatgaattcttaaaggattatgctttaatgctgntatctatcttattggtcttgaaaatacctg

SEQ ID NO: 8922 - DNA, 501 bp, Homo sapiens
ccattgctagttggacgtcggaaggaaaaaaatgttcaaggtataattgaaatcctcaaaggaatgcaagaattgggagtacatcctgatcaggaaacatatacagattatgtgattccatgctttgatagtgtaaactcagcacgagccattttgcaggaaaatggatgtctgtctgatagtgatatgttttctcaagctggattgagaagtgaagcagcaaatgggaacttagactttgtattatcatttttgaaatcaaatacattgcccatctcgctgcagtctataagaagtagcctactgctaggcttcaggaggtctatgaatataaatctttggagcgagataacagaattgttgtacaaggatggacgttattgccaggagcctcgaggaccgacggaagctgttggctattttctttataacttgattgacagcatgagtgactcagaggtacaggccaaggaggagcatttgagacaatacttccatcag

SEQ ID NO: 8923 - DNA, 604 bp, Homo sapiens
  unsure (565): n=A,T,C or G
ctggcaatgacaagactgggagtatcaaactaggattgttagttcaattaaaatttcagataaacaataatgtacttatactaaaaaattatttgttgtttatctgaaatgaaaatttaactgggtacccaattgtttgtttgtttaatctaaaaaccctgattgaaatttatctaataaaacatcatttaatatctaaaataaaataaatttactataacatctttataactattcaatcaatgattcatcttctatttttccaaattcttgcacaaatatttgatgcttaaataaatacataaataataaataggttaataagttacacttgaaaataatttatgttatgatgaaaaaacttaaagtgcttccacatgtcctcacaacatcactgtgaggtaagatggtggctaatactttttccacttagaaataaaggagaaaccaaggcacagtggaacaaggacttgtggatcctggctagcagactagggttgccagatttaacagaaaaaaatccaggatttccagctaaatttgactttatggcaaaatttattgncccatcatttttatgtgatgcttcaaatatcacattcta

SEQ ID NO: 8924 - DNA, 577 bp, Homo sapiens
ccaagggcagtttgctggatttcctgaagagcaatgaaggtggcaaagtgctgcttccaaagctcattgacttttctgctcagattgcagagggaatggcatacatcgagcggaagaactacattcaccgggacctgcgagcagctaatgttctggtctccgagtcactcatgtgcaaaattgcagattttggccttgctagagtaattgaagataatgagtacacagcaagggaaggtgctaagttccctattaagtggacggctccagaagcaatcaactttggatgtttcactattaagtctgatgtgtggtcctttggaatcctcctatacgaaattgtcacctatgggaaaattccctacccagggagaactaatgccgacgtgatgaccgccctgtcccagggctacaggatgccccgtgtggagaactgcccagatgagctctatgacattatgaaaatgtgctggaaagaaaaggcagaagagagaccaacgtttgactacttacagagcgtcctggatgatttctacacagccacggaagggcaataccagcagcagccttagagcac

SEQ ID NO: 8925 - DNA, 467 bp, Homo sapiens
  unsure (55): n=A,T,C or G
  unsure (75): n=A,T,C or G
  unsure (102): n=A,T,C or G
  unsure (124): n=A,T,C or G
ccactagctgaatcttgacatggaaggttttagctaatgccaagtggagatgcanaaaatgctaagttgacttangggctgtgcacaggaactaaaaggcangaaagtactaaatattgctganagcatccaccccaggaaggactttaccttccaggagctccaaactggcaccacccccagtgctcacatggctgactttatcctccgtgttccatttggcacagcaagtggcagtgtctccaccacctatgatggtgatgcagcccctagaagtggctttcaccacctcatccatgagagctttggttccccgggcaaaagcttcccattcaaatacccccacaggaccattccacacaatctgcttagcccgagtgacagcctcagcatacttcttgctgctttcaggaccacagtccaagcccatccagccagcaggtatgccagaagccacagtggcttgg

SEQ ID NO: 8926 - DNA, 478 bp, Homo sapiens
ctgaaccctcgtggagccattcatacaggtccctaattaaggaacaagtgattatgctacctttgcacggttagggtaccgcggccgttaaacatgtgtcactgggcaggcggtgcctctaatactggtgatgctagaggtgatgtttttggtaaacaggcggggtaagatttgccgagttccttttactttttttaacctttccttatgagcatgcctgtgttgggttgacagtgagggtaataatgacttgttggttgattgtagatattgggctgttaattgtcagttcagtgttttaatctgacgcaggcttatgcggaggagaatgttttcatgttacttatactaacattagttcttctatagggtgatagattggtccaattgggtgtgaggagttcagttatatgtttgggattttttaggtagtgggtgttgagcttgaacgctttcttaattggtggctgcttttagg

SEQ ID NO: 8927 - DNA, 605 bp, Homo sapiens
ctgggaagccacgagaatattgtgaacctgctgggggcgtgcacactgtcaggaccaatttacttgatttttgaatactgttgctatggtgatcttctcaactatctaagaagtaaaagagaaaaatttcacaggacttggacagagattttcaaggaacacaatttcagtttttaccccactttccaatcacatccaaattccagcatgcctggttcaagagaagttcagatacacccggactcggatcaaatctcagggcttcatgggaattcatttcactctgaagatgaaattgaatatgaaaaccaaaaaaggctggaagaagaggaggacttgaatgtgcttacatttgaagatcttctttgctttgcatatcaagttgccaaaggaatggaatttctggaatttaagtcgtgtgttcacagagacctggccgccaggaacgtgcttgtcacccacgggaaagtggtgaagatatgtgactttggattggctcgagatatcatgagtgattccaactatgttgtcaggggcaatgcccgtctgcctgtaaaatggatggcccccgaaagcctgtttgaaggcatctacaccattaagag

SEQ ID NO: 8928 - DNA, 605 bp, Homo sapiens
ctggtggaagctctctgaagaactgagacaggaggtggcactgctctgacaccatcctttgaaggtgacagagcatctcagggcttgggggacgccagccggactttgagaggagacagaagaggtgcttgcagaggtatttcacaaagatcagggtctcggcccaaaagttgacttctgctttttcaaacaggtagtcttcttccacctgatgcatgctctccacacaggccacgaggtcatcactctctcccaacagccatcccagcaggatgggcagtccaggggccaactggtcccactgctggagcagatcacacaggacggccagggccagggccagagcgatggaggcatccacctggcagaaggcaaactctgttgactggcaggtattttcttgtgacatggcagttgtcacggtttccgtggctgcatctctaacagcttgctcctcactctgcagaagggtaaggacacacttccagagagcaagtgtatcctgcaactcaagaataggatgggggttggtgaggaaaagtggtgtagtactggtgaggacttcaacgacggccagcctagactctgtaggaagatggtcttca

SEQ ID NO: 8929 - DNA, 598 bp, Homo sapiens
ctgctgaaccctttagggcatttcctctgtaatgtggcgctttcaactgtactgctgcagctttaagtaccttaaagcttctcctgtgaacttcttagggaaatgttaggttcagaactaaagtgttttgggtgggttttgttgcgggggggagggtaacaatgggtggtcttctgatttttatttttgaggttttgtcaactggagtacgtagaggaactttatttacagtactttgatttggcaggttttcttctacttgtgctctgcctggagctgtttccatatgatataaaaagcaagtgtagtattccattactatgtggcttagggatttatttgttttttaaaatcaaccatgttagctgggattagactccctacagtccttcaatggaaaagtaacatttaaaaatcctttgggtaattcaaattacagatttaaaagagcttaagatctggtgttttgttaatgcttctgtttattccagaagcattaaggtaacccattgccaagtatcattcttgcaaattattcttttatataactgaccagtgcttaataaaacaagcaggtacttacaaataattactggca

SEQ ID NO: 8930 - DNA, 597 bp, Homo sapiens
ctgaatttcacttttctttaaaaatttaatattaaaatgttttcatctcttaattgttggcttgcttgcatggatcattcattaaataattttttatttgctagatacccataatatctgccgaacatctgactagccacaagtatgttacccagatgtagaattttcatcactaaacagtaagttcattatgtaatatatagttgcatatttgtggtggttttttttaagatagcaattgtatagtgcacttaaaattttgcgaaatctctgagaaaatatatacagatcacatttttatcttaaatgggtgtgaggaattttatcagacatctttataacaaatatgttaatatcacttaaatatacaaagtactaagagaaaataaattttttaaatttctgattagagataaacacagcataaagaaaatgtatgaccaaaaagtaattagaaggtatagatcaagggttggcaaactttcttatagggtcagacagtaagtatttttgctgtgtgggccgtatcgtttctgttgcagctactctcctctgccattgtatcatgaaagcagccagagaccacatgtaaacaaa

SEQ ID NO: 8931 - DNA, 576 bp, Homo sapiens; identical to SEQ ID NO: 8798

SEQ ID NO: 8932 - DNA, 305 bp, Homo sapiens
ccttgctcggagtcccaggagatccacaggtccggcatgaacagtgagaggtcagaggtggaaggctcagcaggagaggagaggaggatcagcagaggtcatgagaaggccagaatccagggtcaggctgtcctggtcgaagttgagtttcttagctggaggagtttctcctagcccttcaatatccaccacgtcactgttggcatcggagtcgttcagagcactgagtgtcacatcagccttctgtttctttatggggggacccccggcctcagggacactggagctgctgggaggaggggcag

SEQ ID NO: 8933 - DNA, 401 bp, Homo sapiens
ccgcgccggtgagtagcactctctgagagctccaatttcatccgtctgccatcggcgccatcctgcaatctaagccacaatggtgcgcatgaatgtcctggcagatgctctcaagagtatcaacaatgccgaaaagagaggcaaacgccaggtgcttattaggccgtgctccaaagtcatcgtccggtttctcactgtgatgatgaagcatggttacattggcgaatttgaaatcattgatgaccacagagctgggaaaattgttgtgaacctcacaggcaggctaaacaagtgtggggtgatcagccccagatttgacgtgcaactcaaagacctggaaaaatggcagaataatctgcttccatcccgccagtttggtttcattgtactgacaacctcag

SEQ ID NO: 8934 - DNA, 593 bp, Homo sapiens
aaggctaccatgccggatctgtaaatgaacctgttaaatgctgtatttgctccaacggcttactatagaatgttacttaatacaatatcatacttattacaatttttactataggagtgtaataggtaaaattaatctctattttagtgggcccatgtttagtctttcaccatcctttaaactgctgtgaatttttttgtcatgacttgaaagcaaggatagagaaacactttagagatatgtggggtttttttaccattccagagcttgtgagcataatcatatttgctttatatttatagtcatgaactcctaagttggcagctacaaccaagaaccaaaaaatggtgcgttctgcttcttgtaattcatctctgctaataaattataagaagcaaggaaaattagggaaaatattttatttggatggtttctataaacaagggactataattcttgtacattatttttcatctttgctgtttctttgagcagtctaatgtgccacacaattatctaaggtatttgttttctataagaattgttttaaaagtattcttgttaccagagtagttgtattatatttcaaaacg

SEQ ID NO: 8935 - DNA, 579 bp, Homo sapiens
  unsure (465): n=A,T,C or G
  unsure (549): n=A,T,C or G
ccaacatggtgaaaccccatgtttactaaaaatacaaaaattagccaggcatggtggtgcatgcctgtaatcccagctactggggatctgaggcaggaggatcgcttgaacccaggaggcagaggttgcagtgagctgagatcatgccactgaactccagcctgggcaacagagagactccgtctcaaaaaaaaaaaaaaaaaattcatcaaggtatatacatatacattcagattagtgtacatgtaaaatatgatatacaacagagcctttcatgaataggataatttgcatattcatatggaaaacatatgcagtatcttaagccatagttttccaaaatttcaaattaaatacttatagctttgacatattcctgttacttcaactttccagggatgctctagaagaaacgggagacatgttgtaagactttaatgacattccacaaactaaatttattgngggaattaacatcagaaattaagggaaaaaatactctaatttgatcactagctgctacatggtccactttctagggagtcttgnatatttttttcacaattctgtttgctaagt

SEQ ID NO: 8936 - DNA, 487 bp, Homo sapiens
ccacaggtcctgcctagacacacatcaatatgaaacaaaaaaaatttatataaataagtcaattaaacttcacaaaaactaaagaaacacaagacaaaaatccaacaagcaataaaaactgtacaatattggtcagtcttttatatctgaaaaatgtgtaacttaaaaaaaagttatttatcgtataaaaaaaagtcttttacatctgtgttagctggagtgaaaacttgaagactcagactcagtggaaacagatgaatgtccacctcgctttcctttggagaggatcttgaggctggaccctctgctcacagaggtgagtgcgtgctgggcagaggttttaaatttggctccaaggaaagcatagaggatggggttcagacaacagtggaagaaagctagggcctcggtgatggaaatccacttgtgcacagtgttctcaaactcacacccttgcttgatgatttccaggaggatgaaggagtcg

SEQ ID NO: 8937 - DNA, 608 bp, Homo sapiens
ccacgaagcaccgccaggacagttttcaaggaagagaaagtaaagggtctccaaagaagcggctggatgtccgtctgtcgagaacgtccagcgtggagcggggcaaggagagggaggaggcttggagctttgacggggcattggagaacaagcgaactgccgctaaggaatctgaggagaacaaggagaacctgatcataaattctgaactcaaagacgacttgcttttgtatcaggacgaggaggcgctgaacgactccattatttctggaacactgccacggaaatgcaagaaggagctcctggccgtgaagctaaggaaccggccaagcaaacaggaactagaagaccggaacattttccccagaaggactgatgaagaaagacaggagatccggcagcagatcgagatgaagctttccaaacggctgagccaaagacctgccgtggaagagctggagagaagaaatatcttgaaacaaaggaatgatcagacagagcaggaagaaagaagagaaatcaagcaaagattgacaagaaagcttaatcagagacccactgttgatgaattaagagacagaaaaattctgatacgattcagtgattac

SEQ ID NO: 8938 - DNA, 383 bp, Homo sapiens
ccaggcattaaacttagtaacattaagtacactttagtactacagcagtcaaagagatctccactagagatcagaaagaagcaccactattttcttctatgacgtgtatgtgttggtcatgagcatgctagtatgaataaggcaatgtgttaagcactggcatacaaatgcagctaaaggtgctgaaggaaggcagtggggtggtgcaggcacacagcagggagctcttccccgtgacacgttagtcatcttctccacagagcaacagaagagctttcttatagtccccagatgtatctcccttaatcatggaataaagagaggtggcaaaattcttcctaaactccttcctgatgttaaacagatcaatctcactcctggaa

SEQ ID NO: 8939 - DNA, 604 bp, Homo sapiens
  unsure (499): n=A,T,C or G
ccacagaacagtccctttttgagtaaagcagcaaggttgcttaatgacatgctatgtggttaacaagattcaactgccacatcaaggactttaaataatttcaagattttaaatgtatttatgaaatgaactcattacagcagctaatcaatgcaaactttgtcctttttctttgtctttctaagagaaactgaatttaatttaaatttaaattacagtgtctaaaacttggtaaaatattttaaatttgaataagaggaaaaaaaaaacatgaatttatttatgatggagcttcatacccaggacagtagcttcttaaatgttagtaaaataattatgttaagcattaaaacaattttgaatatgtaattaagcatttatgttaaaaaacatgtttcttacgtgtgtgtgtatatatttataactgacacatgtgattctttgtacagtatttagaatccttcccttcagatagcagtcctcttgtattcagtcttgnggctaaaatagatcaaaaacatattttaaaactgttaaagtaactgtatgactcatgcttgaagttctgaaatttgggagcgttatgaggtttccatgccattaa

SEQ ID NO: 8940 - DNA, 279 bp, Homo sapiens
ccaccaccacgtcgatgcggtccactgagaaggggttgaactgcttgtccggccggcgcatgaactcatgcttgaggaggtagccgctctgcccgttgaactcaaatactgccatgttctgctgcatgggcaagtccatcgtctggaagttgagggcaaccatctggcatccagcattccagaacatctggggcatgtagttggaggagtccatgcgggttcccttggggtaaatgcggctcatctggcgcttgttgtagtccacaaactgcaccgagg

SEQ ID NO: 8941 - DNA, 234 bp, Homo sapiens
ccatttaagtttagtagtaaaagactggttaatgataacaatgcatcgtaaaaccttcagaaggaaaggagaatgttttgtggaccactttggttttcttttttgcgtgtggcagttttaagttattagtttttaaaatcagtactttttaatggaaacaacttgaccaaaaatttgtcacagaattttgagacccattaaaaaagttaaatgagaaaaaaaaaaaaaaaaaaa

SEQ ID NO: 8942 - DNA, 438 bp, Homo sapiens
ctgggaaaatgaagggaatcatggtcaaatccttggagggacagaaggaaggcaatgggagaaaccagccagcctgggttttcaataccaactcacatgcaaggtaacccaagcctcatcctctgatctgtaaattggggcaaatgtgaattatttcccttgttgaaaaatatttaaaagatgagggtaggtggaacgtgaacatatgtgtgttttaaacttactgtagcttattgataggaattacagttctggcaaatttcccaaaacctgtagtaataccgtaaacaactaggataaaaagagacattatgcaattaaatgcagggatttttgtttgtttataaaaatatttataacataaagataaaaagatacctgttttctcttttatgatgctatctatgacctccctggatttctgcaccctcttctcag

SEQ ID NO: 8943 - DNA, 573 bp, Homo sapiens
  unsure (519): n=A,T,C or G
  unsure (520): n=A,T,C or G
  unsure (522): n=A,T,C or G
ccaggctggtcttgaactcctgaccccaggtgatccactcgcctcggcctcccaagtgctgggattacagacgtgagccaccacgcctggctcactttattttattgatgaagagccccaaacactgggtgggaaggggacttaaggccactcagctcatcggtgggagagacgggacaccttttccatcccacgatgcctcatagaaccgggagagagtggaggacgctaagtgtagaaaactctgttaaggagcttggtgctcgggtgagaatggaggcagcagagcactttgggaaggggcaagagaaagaggacagttctagaaagacagttctttcaagatagcccgttggagatgcctggcaggaaatgggcactcaaggctggagatgcatctttagatgtggagtcttaggattaggtggaagcagaagacctgagcatgtctgggctttcacacgaaggatgagaagagacgaggatggaattccagggcacaccaaccatgaatgggcnngncaaaggaaaaaccgccagcaaaggagaccaagaaggtgataaaacagactt

SEQ ID NO: 8944 - DNA, 591 bp, Homo sapiens
  unsure (584): n=A,T,C or G
ccaaagaccaaattccttggcatgccttccagcaccctgcaaaatgagaccctcgtggccttccccagcctcttctagagccgtgatgcctccctgttgaagctctggtgacaccagcctttctcccaggccaggctccttcctgtcttcctgcattcacccagacagctccctctgcctgaaccttccatctcgccacccctccttccttgaccagcagatcccagctcacgtcacacttggttgggtcctcacatctttcacacttccaccagcctgcactactccctcaaagcacacgtcatgtttcttcatccggcagcctggatgttttttccctgtttaatgattgacgtacttagcagctatctctcagtgaactgtgagggtaaaggctatacttgtcttgttcaccttgggatgatgcctcatgatatgtcagggcgtgggacatctagtaggtgcttgacataatttcactgaattaatgacagagccagtgggaagatacagaaaaagaggggctgggctgggcgcggtggttcacgcctgtaatcccagcactttgggaggccaaggagggnggatcac

SEQ ID NO: 8945 - DNA, 266 bp, Homo sapiens
  unsure (31): n=A,T,C or G
  unsure (138): n=A,T,C or G
  unsure (220): n=A,T,C or G
  unsure (221): n=A,T,C or G
  unsure (244): n=A,T,C or G
  unsure (256): n=A,T,C or G
tgattgtagctatgttggtgtatctcgtgtncaagatggaaaagtgcttttgttgttctacctgatccagttgggggagcaggaatagggggtgcctgcctaacggcctctagcccatgtgcttatactgggatctgncccgagggatctgcacctggttggcagtcattttgtggtggacgtggtaaatcgcgagtgttaccatgatgacgaggcccannatgagccccaaaatcaggggcanggtttcttccanttgctcccgc

SEQ ID NO: 8946 - DNA, 460 bp, Homo sapiens
  unsure (125): n=A,T,C or G
agaaaggaataagctattaatacatgccacaacctagatgaatctcaaaataattatgctgaatgaaaaaagcagaagaaatatttgaagtaataatgactcagagtttcccccaaatgaacgtnagataacaaaccacagatccaggagaacactaacaggaaaaatatcccccaaaatatatcaaggcatatcatatttaaattgcagaaaatcaaagataaatacaactctgaaagtagccagaggaaaaaactttacccacacaggggctaagataataattatgtctgactacgcctcaggagccatgaaagcaagaaaagagtccggagaaatatttaaagcattgacagaaaaaaaaataccaccaacctagaattctggtaccctgggaattgcctcaaaagtaaagaataaatactttctcagacaaacaaaaattgagagaatttgtcag

SEQ ID NO: 8947 - DNA, 572 bp, Homo sapiens
  unsure (72): n=A,T,C or G
  unsure (254): n=A,T,C or G
  unsure (295): n=A,T,C or G
ctggtcaagaggctcacatctgcagaggtgccaatggccacagacaggctgctctctgagggttctgttggnggagaatctgaaggctgcagatcctttctagatggaagcttagaggatgcttttaatgggcttttacttgcattagaaccacataaagagcagtataaagagtttcaggatctgaaccaagaagtcatgaatttggatgatattctaaaagatgctaaacaccttgacgatcagaaactaantggtgctgcctcttggacggagatcactgagggtgaatganacaactgtgatttaaaagaccgaaagacgttttcccatgtgcttttgtgccatcttgagtgtcagagacagatccctgcaaggcccttcctaccttgcgctaagaaatcagcaaggagtgtcacctaactggatggaggacatttagtgcttctaacttgcagaatttgtcccattcgacccaccccagcatcctcttgaatatttggaaatacttctctccaactctgtgcccatagcaactggcattgttttgcttgtaatgtttctgcatgtgg

SEQ ID NO: 8948 - DNA, 381 bp, Homo sapiens
  unsure (9): n=A,T,C or G
  unsure (18): n=A,T,C or G
  unsure (112): n=A,T,C or G
  unsure (142): n=A,T,C or G
  unsure (242): n=A,T,C or G
  unsure (272): n=A,T,C or G
  unsure (315): n=A,T,C or G
  unsure (366): n=A,T,C or G
ctggatctncaatgcagncgattgttcctccaaaggccaagtaccatgctcattgagggtaggttttgtagctccttctgacactttacatgaagtgccttgtcagcacatntgtagccttgaccacagcttaaatgtttgnatactcctttttattagggcagcttcattttgtttacacactgttttcatttctccagggaacaatttcaaaatgatcttccagatgctatataactaanaacttttaaactactgacctcaaaggtcancctgtttactggcatctgactgtgtagaacaggaagtttgtgntgcatcttgtgttcttaatgaaatccgacaacagaggactgaacgcattantctcagaacaggagg

SEQ ID NO: 8949 - DNA, 564 bp, Homo sapiens
cctctcagaaaactgagcatactagcaagacagctcttcttgaaaaaaaaaatatgtatacacaaatatatacgtatatctatatatacgtatgtatatacacacatgtatattcttccttgattgtgtagctgtccaaaataataacatatatagagggagctgtattcctttatacaaatctgatggctcctgcagcactttttccttctgaaaatatttacattttgctaacctagtttgttactttaaaaatcagttttgatgaaaggagggaaaagcagatggacttgaaaaagatccaagctcctattagaaaaggtatgaaaatctttatagtaaaattttttataaactaaagttgtaccttttaatatgtagtaaactctcatttatttggggttcgctcttggatctcatccatccattgtgttctctttaatgctgcctgccttttgaggcattcactgccctagacaatgccaccagagatagtgggggaaatgccagatgaaaccaactcttgctctcactagttgtcagcttctctggataagtgaccac

SEQ ID NO: 8950 - DNA, 608 bp, Homo sapiens
  unsure (34): n=A,T,C or G
  unsure (36): n=A,T,C or G
  unsure (43): n=A,T,C or G
ccaaacatacattaagtttaatttcaatgacagntncaatttncaatttacttttagatggttagttaactcttttcctactaaatgaaaatattcaatatgccacatatgaaaaaaataaaattctcccacccacaaaaaatcctccaggggcacaaaaaaaatcatttgttccctcatttttaaatatttctgcatgatgagacaatataaaggcacaatataggttaaaataaatcactctgtggtttctcaaaaaaagtgaaaacagatccaccatatgatccagcaatcccacttctgggaatacatccaaaagaaaggaaataagtaccttgaagagatatctgtactcccctgtttattgcagcactattcacaatagccaagatatggaagcaataatatttcttcttgaggaataaaatttttaaatgtggtatttatatacaatggaatattattcagccatgaaaaagaataaaactctatcatttgcagcaacatggatggaactggaggatattatgttaagcaaaataagccaggcacagaaagacaaatatcacatatcctctgtcatatgtgggagctaaaaaagttgatct

SEQ ID NO: 8951 - DNA, 479 bp, Homo sapiens
ctgggaacatttcccagtgcaactcacatttttcactgctctgtgcctgtctgtataagctcaatgagtattgatttaggggctttggagaactttgaatgctaccccccaagtaaccattattggcaacctggtacctctacttttagccatttctccttctctataaacagtgcagaagtaacccacttggtaacaggcatccttgccaagcctccaccactaggtcagtgtaagaattaaagaaagaggaaagaaacacgaaaagtggcttgatggttaagacaggtttattttagagaaaacacacctgagaggggctgctggctgaattaggttagagtcttttctacagactaagagtgtttaaggatttagggtgggagagtttcttagaggcttggactgcttctgtgtttttttgttgtgcttatatgggagggagagtggtgtgtttgcttttatacatttttctgcag

SEQ ID NO: 8952 - DNA, 608 bp, Homo sapiens
ctgtggctgtctgtcagagaagcacatttttctgcagataattagaatggcttcccccatctctcacggactgtcccaagtctagaaaagaattgagttcctcttctattagtcaaataaaagggaagagaatgtttgtcttcctttcctttctgtagtgttaagaaaataaacgaacttaatgattctaaattatcagtgagcttaacactgtactatagaccaaagattaccttttcaaaaagtcctttgaggtgaaatattttgtatacgtaatacatagatgcacatataaacacacacatatagaatctcaatattttaacacttctttgggtagttgtactaactcactaaccctgaggaaaaagttaagaaattgaaagtgttttcttcaaaagttgagatttaacaataaaaggtgttactttgataactaaaaggaactttattatcctcttcctaaaataaaccaatgcctattctgaaaatggcacttgcaattacaatttgccattatcaaagctaccactgaggtagaggcattatctaaaacaaataccacttatcatttattggcagttacctcgagagagacccatacacca

SEQ ID NO: 8953 - DNA, 68 bp, Homo sapiens
  unsure (28): n=A,T,C or G
  unsure (33): n=A,T,C or G
  unsure (47): n=A,T,C or G
  unsure (50): n=A,T,C or G
  unsure (52): n=A,T,C or G
  unsure (61): n=A,T,C or G
  unsure (63): n=A,T,C or G
tacttttatatttccatacaatcagaancagtnaaaaaaatttgganagnanataaaaacntnttaaa

SEQ ID NO: 8954 - DNA, 547 bp, Homo sapiens
gcccggccatcttatttattttaaaaatgtatgtatttatagatttaggaggtataagtgcagattccttacacgcatgtatcacatagtggtgaagtctgggcttttagtgtacctgtcacccaaatagtggacattgtattcaactggtaatttttcaatcctcagccaactccaacccagaaaagcactttgaaaaaatgactttggctgcagtgtagtttggaagtagcccatgctagatacaaggagcctagcaaaatattatcacagtaattcaaaggatagataatggtaggttagactagggtggtgactgtgaagatgaagagaaatgaaataaattgatcgataattaagaggtaaagttaggctgcgcatggtggctcacgcctgtaatcccagaactttgggaggctgaggtgggaagattgtccaagagttcaagaccaatctgggcaacatagtgagacctcgtctactaaaactcaaaaaaattagccgggcatagcggcacacgcctataatcccagctacctggggaggc

SEQ ID NO: 8955 - DNA, 602 bp, Homo sapiens
ctgcacatggattggttaacataatatatactgctatataatcttttaagggctaatatttgtagataatttaaaagcatgtcaatttcctctaagatttgattatttaacctgcacaaaggccaatcttcagttatcaatgacaagaaaactctagggctgccaaaataacttcattttagaccccagagttagtgttaggctggtaatgtttctaatttgggaataatgagactagaaagctaggagggccccctccaaatttctcccttgtattaggctgaagtagaacataacgtggcttaaagcataaacttaaagcatatgctttgagttttaaaaatgttaacctgtaattaattattagagtattatccatagtctactatgatagtcagttaatattctctaaatcagattatattcatttgaaaatgcatctgcatatttgcaaatgtgttattacacaagatcttacctatgtcaatttaaagaggttaaagatgcaggaagcccccactaaaatgtaaacacatttgtacggttttcagaatgtttggactcattctttcccattgacagagcagtaggttttaattaga

SEQ ID NO: 8956 - DNA, 381 bp, Homo sapiens
cctgagacctgggaggaagctggagaaaagatgccctctgaatctttgtgtttggctgcccaggctcgccttgacaccgaatggttgaaaacagatatacagatggtagtgtcgaaccaagtggaacaaagaaagaagatctgaatgacaaagagaaaaaaaatgaagacgaaactcctgcacctgtatatagggccaagtcaattctggagacctgggtgtgggtcaagcaaccaggtaatctgagttttggcactttggaaagcttgatctgacgctccttttctaaataacttggatggattattcgtattttttggtaacaattttaaaaaatgtaattaaaaaaatttaaatatcgtggtaaaatatacataccaa

SEQ ID NO: 8957 - DNA, 535 bp, Homo sapiens
  unsure (219): n=A,T,C or G
  unsure (280): n=A,T,C or G
  unsure (367): n=A,T,C or G
  unsure (384): n=A,T,C or G
  unsure (424): n=A,T,C or G
  unsure (527): n=A,T,C or G
ccagaaaggaaactgacgagcaggtcacatgatcaggagccagactcctgagttgtaactgggcccccaactttccgtgtgattattaaaagagcccttcttcttttctaaaacttagtgccaaatgctgaggagcataatgtaggtgagaattttttttttggggggggtgaaaattaagctagagcttcttgaagtacctagtttccaggggctttntattgtatttttccttatggtcctagaatgacatcaacttggaaatgaagcttttgctganaaagctggaggtgatagtggtggtgattttgggagtggagtggacgtgataatgggaccctttaagtcatctatttcccaaggtgtntatcaaatgagagcagncctaacaatatataatctgttggggttgtaactatggtangacataataacatcggcaaaatgatttaattttctgcagcaggattgaaggttgcacgcagttaaaaattatgttaaatttatttacattaatgcaaaattgncatagacc

SEQ ID NO: 8958 - DNA, 607 bp, Homo sapiens
  unsure (8): n=A,T,C or G
ccatcggngctgaaattgagcattttaaatagtacagtaggctggtatacattaggaaatggactgcactggaggcaaatagaaaactaaagaaattagataggctggaaatgcttactttctgctctcattttctttcattttgtctgctgtctttttgaatgccaatactttcatttaaaatgttttgggagcacggcaacccaaaatgactgaacggtggtccaaaaatccaaaccaactgataattacttctcgaggtgataggaaaggcacaggaagttaggactttggctgaaatgatgaaaacacatgttcgccattttagggatcagcgcctcgactcctgccacctccggctccaacgatgatcatgtttggatgtatttattgaattgtcctttgctgatgaggaatttttaaagtatttcatagaataagtcctttggtatgcagatgctacatggaaggaaagaaagaaaaaaagaaaacacacaatattacttgctccataccctaaactgccgataccacagccgtaaaatgaaggtgtctagtagttgttatagcacggtagtccattctttctaaaggaccacttacggtt

SEQ ID NO: 8959 - DNA, 570 bp, Homo sapiens
  unsure (110): n=A,T,C or G
  unsure (274): n=A,T,C or G
  unsure (372): n=A,T,C or G
caatatttctaaatcatattttgatgacaacttacaggatcagtgattgagacaatgactagtgtatcaaacgctatctgatagttttcttagcatattccgtgtgtggnggtacatttattgtggtgtgcaaaatctgacaactgacgatttttctctgtcagcaaaactaacaaatttttaaaaatgattttaatagttataactaaaataagcttagacttccaagtcagtcaaatgcccaaactgcatgttttctgccgttccccaaatncttttacatgttttaaatagcctttagaatatgatcgatcacatggctgtatttcagatctaaaagttttgagattttcaaaatcaaaaattactttnttatgcaaaatggcaatgcaaacagcaatcctacataatgtagaataatttttcttctgtacggctccttctaaaaaatgggtaaccacacacacacacacacacacacacgacataaatttagtccatctgaagaagcactccagctttctaattccacttttgaaggaaaaggcagaggcatgtttacattatccc

SEQ ID NO: 8960 - DNA, 86 bp, Homo sapiens
ggaatcatataatataggtactttgtccctgattaaataatgtgacggatagaatgcatcaagtgtttattatgaaaagagtggaa

SEQ ID NO: 8961 - DNA, 458 bp, Homo sapiens
tcgacacgatgacacacaataatttttggttgaagaagatagaaatcagtgtttcagaagcagaaaaacgaactggaagaaatgccatgaacatgcaagaaacatatactgcttacctcattgaaacaaggtcagttgaacataccgatggtcagagtgtcctaacagactcactatggcggcgatatagtgaatttgagttgttgagaagctaccttttagtttactatccacatattgttgtgccacctctgccagaaaaacgggcagaatttgtttggcataaactctctgctgacaacatggatccagattttgtggagaggcgacggattggtttagaaaactttctcttgaggattgcttcacatcccatcctttgtagagacaaaatcttctatctgtttttaacacaggaaggtaactggaaggagactgtgaatgaaactgggtttcag

SEQ ID NO: 8962 - DNA, 603 bp, Homo sapiens
  unsure (529): n=A,T,C or G
  unsure (566): n=A,T,C or G
  unsure (585): n=A,T,C or G
ccactgtgtagcaccttctaattcaatttcatcggcagttgtaataacagttccagcctcaggtgttttaatggtgggaaacatcttgattgcttctccagaaacttgaccatcggttttgttttggaaatcttggagaatctcagttccttccacagcaataagttctgtgggagaagcttccatttcttctaataactcaggtttaccatcatcttctgaaggttctaattttgtgtcaggagataaagagggaggctcagttatgtgaaggtattcctcacttgatggtttgaaagtcgcttcaatatttacatgaatttccttaaaagaatcctgtggggacattacagatgagccgacgtctattcctggcagagcactgggctgggggatctctgtgtgtccagaggcttcactgcctgagtagatagtgaggggagatgatggtgtctgagaagacaacttcgcaaatgttgaaactgctaatgttgtatcagtgtaatatgggggattggatccttccatnacatcaggcacctctgttacactctgatccataaggngggtagtagcaatacttanatagggagtatggtctac

SEQ ID NO: 8963 - DNA, 596 bp, Homo sapiens
gttgtagggttgccagatgcaatacaagattcctggttaaatttgaatttcagtaaacaatgaatagtttttcattgtaccatgaaatatccagaacatacttatatgtaaagtattatttatttgaatctacaaaaaacaacaaataatttttaaatataaggattttcctagatattgcacgggagaatatacaaatagcaaaattgaggccaagggccaagagaatatccgaactttaatttcaggaattgaatgggtttgctagaatgtgatatttgaagcatcacataaaaatgatgggacaataaattttgccataaagtcaaatttagctggaaatcctggatttttttctgttaaatctggcaaccctagtctgctagccaggatccacaagtccttgttccactgtgccttggtttctcctttatttctaagtggaaaaagtattagccaccatcttacctcacagtgatgttgtgaggacatgtggaagcactttaagttttttcatcataacataaattattttcaagtgtaacttattaacctatttattatttatgtatttatttaagcatcaaatatttgtg

SEQ ID NO: 8964 - DNA, 606 bp, Homo sapiens
ctgaaggtttttttattctttctttttttaaagtgagcccatgatttggtgtctttcccagattatcccctttgcgacaacacaagcaaaaatatttacaaaggtaaggcatagtcaaactacataaagagaaaaaatcatgaggaaaatacatgaaaaagactaaagacttcgccataacaaggtcttagtgataatagtgtccgtaaagatgtcatcagaattggtaaagtcaagcatgctgcaaatataccctttggattagaaaagagcacaattttctttttttgttttgttctgttttaagaagtggcatactgctctttctccctttggataatttcttttaagcccatcaaaggaaaaaacaaacacaattcaaacaaacactgtcaagtgattcaagatcaaatatttacaataatcaaatggagtatcagattttttttttccaaactgataccacaaatacagagctgaaatctctctttggctcctctatatgcaaaattgaattagtcttcattgaagacaattatatagtcagttccagatgcaaaaggaaacagccttacaaggccctaaagaacacatgctcctacccta

SEQ ID NO: 8965 - DNA, 243 bp, Homo sapiens
agccaatcttcattgctcaagtgtctgaagcagccatggcagaagtacctgagctcgccagtgaaatgatggcttattacagtggcaatgaggatgacttgttctttgaagctgatggccctaaacagatgaagtgctccttccaggacctggacctctgccctctggatggcggcatccagctacgaatctccgaccaccactacagcaagggcttcaggcaggccgcgtcagttgttgtgg

SEQ ID NO: 8966 - DNA, 520 bp, Homo sapiens
  unsure (469): n=A,T,C or G
cctggtgcaaatcaacaaaagtaatgggaaggagacagtggtagggagactcaacgagactcacatcttcaacggaagtaattggatcatgctgatctataaagggggtgatgaatatgacaaccactgtggcaaggagcagcgtcgtgcagtggtgatgatctcctgcaatcgacacaccctagcggacaattttaaccctgtgtctgaggagcgtggcaaagtccaagattgtttctacctctttgagatggatagcagcctggcctgttcaccagagatctcccacctcagtgtgggttccatcttacttgtcacgtttgcatcactggttgctgtttatgttgttggggggttcctataccagcgactggtagtgggagccaaaggaatggagcagtttccccacttagccttctggcaggatcttggcaacctggtagcagatggctgtgactttgtctgccgntctaaacctcgaaatgtgcctgcagcatatcgtggtgtgggggatgaccag

SEQ ID NO: 8967 - DNA, 596 bp, Homo sapiens
  unsure (13): n=A,T,C or G
  unsure (47): n=A,T,C or G
  unsure (49): n=A,T,C or G
  unsure (58): n=A,T,C or G
  unsure (63): n=A,T,C or G
  unsure (81): n=A,T,C or G
  unsure (155): n=A,T,C or G
  unsure (196): n=A,T,C or G
  unsure (211): n=A,T,C or G
  unsure (267): n=A,T,C or G
  unsure (281): n=A,T,C or G
  unsure (282): n=A,T,C or G
  unsure (332): n=A,T,C or G
  unsure (372): n=A,T,C or G
  unsure (520): n=A,T,C or G
  unsure (521): n=A,T,C or G
  unsure (551): n=A,T,C or G
  unsure (579): n=A,T,C or G
  unsure (585): n=A,T,C or G
  unsure (586): n=A,T,C or G
caaaacgcagcantatgactgcaaatggtacattccgctcacggatntnagcttccanatggnggatgaactggaggcagngcccaacatccccctggtgcccgatgaggagctggacgctttgaagatcaagatctcccagatcaagaatgacntccagagagagaagagggcgaacaagggcagcaaggctacngagaggctgaagaanaagctgtcggagcaggagtcactgctgctgcttatgtctcccagcatggccttcanggtgcacagccgcnncggcaagagttacacgttcctgatctcctctgactatgagcgtgcagagnggagggagaacatccgggagcagcagaagaagtgtttcanaagcttctccctgacatccgtggagctgcagatgctgaccaactcgtgtgtgaaactccagactgtccacagcattccgctgaccatcaataaggaagatgatgagtctccggggctctatgggtttctgaatgtcatcgtccactcnnccactggatttaagcagagttcaaatctgnactgcaccctggaggtggattcctttgngtattnngtgaataaag

SEQ ID NO: 8968 - DNA, 601 bp, Homo sapiens
  unsure (63): n=A,T,C or G
  unsure (195): n=A,T,C or G
  unsure (241): n=A,T,C or G
  unsure (598): n=A,T,C or G
caccatattggccaggttggtctcgaactcaccatattggcctcaggtgatccgcccgcctcngcctcccaaagtgttgggattatgggcgtgagccagccacggtgcccggcctgttttattgtttgaaaaacaagtacaggttgttattatccaagaattgttgatagagtatatactgtatttgaagtgtanaactgaggcagaggctgattaatataactagtttacatttgttagnctttcacatctgtgaaggaataaagtacagacaaaagtggaaaacaaaccaggaaaaacaaattgtgaagcacagagctgcttaaaagaaaaaagtcacagaaataagtcagtattttgtttagagactagaactccaactgctagccaactgcctagaatatagtaaatattttctagtttcttaaatgactagtaatattcctacattatgtgatggcatttcccaaactgtttaattagatgttagatttgtagccaaatatgtctaggaaatgcttaaacaatataaaacagttttaatgattggctttttagaacgttatatattagtgtgctttatgcatatccaagaggngag

SEQ ID NO: 8969 - DNA, 457 bp, Homo sapiens
ggtgggcgcgccttaatgataaggagggatatgttccacgtaacttgctgggactgtacccaagaattaaaccaagacaaaggagcttggcctgaaacttccgcacagaattttagtcaatgaagaattaatctctgttaagaagaagtaatacgattatttttggcaaaaatttcacaagacttattttaatgacaatgtagcttgaaagcgatgaagaatgtctctagaagagaatgaaggattgaagaattcaccattagaggacatttagcgtgatgaaataaagcatctacgtcagcaggccatactgtgttggggcaaaggtgtcccgtgtagcactcagataagtatacagcgacaatcctgttttctacaagaatcctgtctagtaaataggatcatttattgggcagttgggaaatcagctctctgtcctgttgagtgttttcagcag

SEQ ID NO: 8970 - DNA, 485 bp, Homo sapiens
ctgcctttgctaaaagtgctgccatgttaggtaattctgaggatcatactgctttatctagagctttgtctcagcttgcagaggttgaggagaagatagaccagttacatcaagaacaagcttttgctgacttttatatgttttcagaactacttagtgactacattcgtcttattgctgcagtgaaaggtgtgtttgaccatcgaatgaagtgctggcagaaatgggaagatgctcaaattactttgctcaaaaaacgtgaagctgaagcaaaaatgatggttgctaacaaaccagataaaatacagcaagctaaaaatgaaataagagagtgggaggcgaaagtgcaacaaggggaaagagattttgaacagatatctaaaacgattcgaaaagaagtgggaagatttgagaaagaacgagtgaaggattttaaaaccgttatcatcaagtacttagaatcactagttcaaacacaacaacag

SEQ ID NO: 8971 - DNA, 380 bp, Homo sapiens
ccaaggctttatattgttgctgtgtaacaacttacctcaatacttaagagcagttcagagaaacaaaccagcatctatgggtcagcaattgggagcaacttaactgattctgggtaaagctcaaggttccaatcacagaaaactaggattggagaatttttttaatatccagagtggcatactaacagctttaaagttaatcctggttgtcatcttccctcggtgagtgatttgagcaagaaaagctgtaaattgaacacgctctacgaagtagtcgtgctatcttgcatcctttatggtcacagaatgtggtgggagggttcttttccctggtacaattaccaagcaggcagggagcattgggaactctcagatgccag

SEQ ID NO: 8972 - DNA, 297 bp, Homo sapiens
ccactgaactgcgctgccagtgtttgcagaccctgcagggaattcaccccaagaacatccaaagcgtgaacgtgaagtcccccggaccccactgcgcccaaaccgaagtcatagccacactcaagaatgggcggaaagcttgcctcaatcctgcatcccccatagttaagaaaatcatcgaaaagatgctgaacagtgacaaatccaactgaccagaagggaggaggaagctcactggtggctgttcctgaaggaggccctgcccttataggaacagaagaggaaagagagacacag

SEQ ID NO: 8973 - DNA, 478 bp, Homo sapiens
  unsure (312): n=A,T,C or G
ctgaaccctcgtggagccattcatacaggtccctatttaaggaacaagtgattatgctacctttgcacggttagggtaccgcggccgttaaacatgtgtcactgggcaggcggtgcctctaatactggtgatgctagaggtgatgtttttggtaaacaggcggggtaagatttgccgagttccttttactttttttaacctttccttatgagcatgcctgtgttgggttgacagtgagggtaataatgacttgttggttgattgtagatattgggctgttaattgtcagttcagtgttttaatctgacgcangcttatgcggaggagaatgttttcatgttacttatactaacattagttcttctatagggtgatagattggtccaattgggtgtgaggagttcagttatatgtttgggattttttaggtagtgggtgttgagcttgaacgctttcttaattggtggctgcttttagg

SEQ ID NO: 8974 - DNA, 366 bp, Homo sapiens
ccttctcccctcctccagagagggggcaggtgaggggctatcaggaacacgctccttaataactgatgtctcaactctggatgggggactctgaacttgtgctgctgctgccatatttgcaatggtgctgaggtggttcatctggctcattgccatggtgacagatgctggaggtaggctgacaggaattagggggtggggcatcatcataaaaggaagttccagtccgacacttgaattcatgtccccgttttcagagtctgctccatgttggttattactggcatgatagttgctcatggcttctaatttgattttttttcaccttcattgcttcagcaatagctgcattggtagcagcagcag

SEQ ID NO: 8975 - DNA, 406 bp, Homo sapiens
tttttatttagcgatgttttatttagctgaaatgttatttcacttgtaaaaactatctccggttacaaaaaaaaatcagaaaccttattaaatttaacctgcttttacaaatgtcctaagaagtcttaagctaaacaaaatttaagtaggaaaacgataatttaaaaatagtgtgttatactatttctgtggtttatgtacatatattaactggtctcttggataggaaacatgactagaagtttatcacactaagcactgtaaaataaaggcaagagctaatcatcttctagaaaaatagtctctatgcaacaattgcaaatgtcaaagctattatttagtagttaattgcctgctacaatacataaaacaaagtacatttactggattgtttttcagtttgcag

SEQ ID NO: 8976 - DNA, 559 bp, Homo sapiens
ccaaaagattgacagtcctgggttgtccagcctggagattgcctttgtggaattgccagaattggtattgctgtatttgggattctgaatcttggcataacagttttggcactttctccacctgagcttgctgtccttcggcttgaacattttggaattgtcctttcggggatttcttctcttgggccggctggtcttcagtttgctgatcctgggtttgcttctttgagttttgctccttatcagtctgctggtctttaacttgtctatctttagattgtccttctgggtattgttcccctttggcttgctgatcttcagcttgctgatctgggagttgctctttagtttgattaagttgagcttgcttatctacggagtgcctctttggggatagccagtctttgatttgctggtctaaggatttctgctttggagattgccagcctttgctttgctgatctaaggaatgcctctttgaggatttctggcctttggcttgcacgtctaaagaatgtctccttaagtattgcaaggctttggtttgctggtttaagga

SEQ ID NO: 8977 - DNA, 502 bp, Homo sapiens
ccaagaagcaacagagatataaagctgaatcttgtagctaacccctgaaagcaagccaacgcaaattcctccgccaggccagtcttctagtgccaatatggagactgtgggccacagaagattcccttctatttcaggttctcaaaaagtggtgtagactcaggcaaatgccaggaaatgtgtccatatgccagaggagacacagagccagaaatgaaggctatgggtcctgtcttcagtgaaacactgaacgctctcggaaagctcccatcattcttgcatcgctactgccaccaagacggtggcaagggaggaggctaactttcaaatgcatgcaacggcaggtaatatactgtggaagctggaggtttacttttcatgttttagttactttcttgcaaacagcagtccaggaaagcaagcaagcaggtaaaactccgggtgtgcatgaggagatgatccaaggccagtgggcctcccagtgagaaccaaacaggagtgg

SEQ ID NO: 8978 - DNA, 556 bp, Homo sapiens
  unsure (508): n=A,T,C or G
cctaacccctgggagggtaaatgtgggtttctagaatactaagtaaatttgactaacaatgccaaaatgccccctgcctgttttgggacgtttacctcagtccctaatgggcttcagacctgaaaaatgcaatgtctggtttgggcactttgggcctgtaagccttcttggtgaagagcagaaactttgcagtaacaccttcagtgagttcaaggctaggatccctgtcaacattatttaatctctttgagctttagcaaaatagggtagataatggtagttatttcatagggttgtgtgcagcttaagggagatcatgaatggacatttctaacccaatgtgacaatcagtgaccaatatgttttggctttttcaaaccaagaatctagttgagtccacagccacttctttcttgaaaaaaaaaaaaaaaagcattcaggagtgcaagttttctgctatagaaggcagtgggtacagacagaccttccctgagtggagggctggganagagtctgcatggggacatccctccaagcaacttcagagtgacagaag

SEQ ID NO: 8979 - DNA, 360 bp, Homo sapiens
ctgtctcttacttttaaccagtgaaattgacctgcccgtgaagaggcgggcataacacagcaagacgagaagaccctatggagctttaatttattaatgcaaacagtacctaacaaacccacaggtcctaaactaccaaacctgcattaaaaatttcggttggggcgacctcggagcagaacccaacctccgagcagtacatgctaagacttcaccagtcaaagcgaactactatactcaattgatccaataacttgaccaacggaacaagttaccctagggataacagcgcaatcctattctagagtccatatcaacaatagggtttacgacctcgatgttggatcaggacatcccaat

SEQ ID NO: 8980 - DNA, 224 bp, Homo sapiens
ctggtgttaatggcatgcaggcatatgtgatgccaaccatgagggctggaagaaccagaagccaaagaagaatatgaccgcatctattctaaagctactgtggtggtttctcatgcttcagagtctcgtaagtctcctggttcctggtgctcaggcccgtgtaaacaccatctgatttctcatagctggttatagctgcctttcgcacttggatcttcagtcga

SEQ ID NO: 8981 - DNA, 593 bp, Homo sapiens
ctggtttcagtgaaactgccaaaatcctcaagccaggaagtagaagccaaggagctgtcctttgttttggattacataaaccagtcacccaagtgcattgcctttggaaacgagggagtatatgttgctgcagtacgggaattttacttgtctgtttattttttcaaaaagaaaacaacatcaaggtttactttatcatcatcaagaaataagaagcatgctaaaaacaattttacgtgtgtagcatgtcacccaacggaagactgcatcgcatctggtcacatggatggcaaaattcgtctttggaggaatttttatgatgataagaaatatacgtacacatgtttacattggcaccatgatatggttatggatttggctttttcagtgacaggcaccagtctgctgagtggcggtcgtgaatctgtacttgtagagtggcgcgatgcaacagagaagaataaggagtttctcccgcgtttaggagctactattgaacatatctcagtctcgcctgcaggagatttattctgcacttctcactctgataataagataataattattcaccgaaaccttgaagcatccgcagt

SEQ ID NO: 8982 - DNA, 591 bp, Homo sapiens
ccatatccttgtctaaaatgtatattgaacaaaatgcatgctcttgaaatgtctcaaaaccttacaccctgggaataattgcatatataacttgtgtttggagaatcacatgaactttaatcagggtaatagcactttcaaacttgctagtagattttactgtaggtgtaatgccttaatcatctttttgaatgttttctcagagctggaggttgctgggcacctaaatgatgtttcatgatagctttgggtgattttactgctatttataatttgctgtataaagtgagcattacttaatttgcaagctgatttctcacagtgtaaatttgttcattcctggtagtctattttctataaaaatgtatttttgcacaacatttttaaaaactggtgtaccttcatctatgacgtgttccattttgacaaacagctttcaggcgtaaatccagagaagtgctttatatgaaatgtattattttgaacagagtttgtgatttggtagttattttatgttgttgaaatttgaatttcacaattcttagataattatttcaaatggatattgatgcattcttgttaccagatgtt

SEQ ID NO: 8983 - DNA, 582 bp, Homo sapiens
cctagtagtggggtgaggcttggattagcgtttagaagggctatttgttgtgggtctcatgagttggagtgtaggataaatcatgctaaggcgaggatgaaaccgatatcgccgatacggttgtataggattgcttgaatggctgctgtgttggcatctgctcgggcgtatcatcaactgatgagcaagaaggatataattcctacgccctctcagccgatgaacagttggaataggttgttagcggtaactaagattagtatggtaattaggaagatgagtagatatttgaagaactgattaatgtttgggtctgagtttatatatcacagtgagaattctatgatggaccatgtaacgaacaatgctacagggatgaatattatggagaagtagtctagtttgaagcttagggagagctgggttgtttggattgtggctcagtgtcagttcgagataataacttcttggtctaggcacatgaatattgttgtggggaagagactgataataaaggtggatgcgacaatggattttacataatgggggtatgagttttttttgttagggttaacgagggtg

SEQ ID NO: 8984 - DNA, 549 bp, Homo sapiens
  unsure (506): n=A,T,C or G
ccagttttcttccttggagtagcaatctgtaaaaataagtgctgctgtttaaaaagtagcatgccctacaccataccaatgtattagtgagaatttggcgattctcaccaaacaacaatgaagtttcacatttggtactggatggagcttgggttagatctgccttttaaggcaaagtcaactctttcaacttaattctttttcaagggagtaatgtactgtctacacttggcttaaactaacttctattatggactactttcaatgtacatgtaaatattcatgcatcagaagccaatttcttttaacagtacatagaaaaggtatattttggggtgctaatgaacacttcaaattaagtaatgatattggtaaggatcaaactgcactattagtcttgttaataccacactggcacacacactgcatatatatgtattttcctaagataaaactcttctcagaatttcattactttttattatacaccaactagtttatattgnagttctttacaaagaaaatgctaagaaaaattataatcacatg

SEQ ID NO: 8985 - DNA, 270 bp, Homo sapiens
ctggtgtttatccgtcactcgccgaggttccttgggtcatggtgccagcctgactgagaagaggacgctcccgggagacgaatgaggaaccacctcctcctactgttcaagtacaggggcctggtccgcaaagggaagaaaagcaaaagacgaaaatggctaaattcgtgatccgcccagccactgccgccgactgcagtgacatactgcggctgatcaaggagctggctaaatatgaatacatggaagaacaagtaatcttaactgaaa

SEQ ID NO: 8986 - DNA, 507 bp, Homo sapiens
  unsure (7): n=A,T,C or G
  unsure (26): n=A,T,C or G
  unsure (41): n=A,T,C or G
  unsure (64): n=A,T,C or G
  unsure (78): n=A,T,C or G
  unsure (90): n=A,T,C or G
  unsure (99): n=A,T,C or G
  unsure (111): n=A,T,C or G
  unsure (161): n=A,T,C or G
  unsure (172): n=A,T,C or G
  unsure (192): n=A,T,C or G
  unsure (211): n=A,T,C or G
  unsure (217): n=A,T,C or G
  unsure (221): n=A,T,C or G
  unsure (344): n=A,T,C or G
  unsure (351): n=A,T,C or G
  unsure (353): n=A,T,C or G
  unsure (393): n=A,T,C or G
  unsure (394): n=A,T,C or G
  unsure (396): n=A,T,C or G
  unsure (415): n=A,T,C or G
  unsure (416): n=A,T,C or G
  unsure (435): n=A,T,C or G
  unsure (440): n=A,T,C or G
  unsure (463): n=A,T,C or G
  unsure (476): n=A,T,C or G
  unsure (482): n=A,T,C or G
  unsure (496): n=A,T,C or G
  unsure (503): n=A,T,C or G
attgacngtcctgggttgtccagccnggagattgcctttgnggaattgccagaattggtattgntgtatttgggattntgaatcttggcntaacagttntggcactttctncacctgagcttgctgtccttcggcttgaacattttggaattgtcctttcngggatttcttntcttgggccggctggtcttnagtttgctgatcctgggtntgcttntttnagttttgctccttatcagtctgctggtctttaacttgtctatctttagattgtccttctgggtattgttcccctttggcttgctgatcttcagcttgctgatctgggagttgctctttagttngattaantngagcttgcttatctacggagtgcctctttggggatagccnntntttgatttgctggtctaanngatttctgctttggagatngccancctttgctttgctgatctaaggnatgcctctttgangatttntggcctttggcttncacgtcnaaag

SEQ ID NO: 8987 - DNA, 364 bp, Homo sapiens
  unsure (17): n=A,T,C or G
  unsure (161): n=A,T,C or G
  unsure (185): n=A,T,C or G
  unsure (189): n=A,T,C or G
  unsure (203): n=A,T,C or G
  unsure (213): n=A,T,C or G
  unsure (219): n=A,T,C or G
  unsure (324): n=A,T,C or G
cctattctgaactgcanatgctgtcccccagcgagcggcagtgtgtggagacggtggtcaacatgggctactcgtacgagtgtgtcctcagagccatgaagaagaaaggagagaatattgagcagattctcgactatctctttgcacatggacagctttgngagaagggcttcgaccctcttttngtgnaagaggctctgganatgcaccagngttcanaagaaaagatgatggagtttcttcagttaatgagcaaatttaaggagatgggctttgagctgaaagacattaaggaagttttgctattacacaacaatgaccagnacaatgctttggaagacctcatggctcgggcaggagccag

SEQ ID NO: 8988 - DNA, 325 bp, Homo sapiens
  unsure (24): n=A,T,C or G
  unsure (45): n=A,T,C or G
  unsure (141): n=A,T,C or G
  unsure (148): n=A,T,C or G
  unsure (163): n=A,T,C or G
  unsure (177): n=A,T,C or G
atcacattctcgatccagaggaangcgatactctcgctcacgcancaggagcaggggacgaaggtcaaggtcagcatctcctcgacgatcaagatctatctctcttcgtagatcaagatcagcttcactcagaagatctangtctggntctataaaaggatcnaggtatttccaatncccgtcgaggtcaagatcaagatccaggtctatttcacgaccaagaagcagccgatcaaagtccagatctccatctccaaaaagaagtcgttccccatcaggaagtcctcgcagaagtgcaagtcctgaaagaatggactgaagctct

SEQ ID NO: 8989 - DNA, 426 bp, Homo sapiens
ccagtcaacatctacagactagaagggagaaaagaagtcattaaaacagatattactgttgtggtaagcatttgctggtaatgctgtataaatttaatagttttaatatagtgcaacagaagaaactgcatttgaagaaaagagctattgaataccataaattaaccctcaagtctgttctaggtattcttgggcctgaggtcttctgaattaattgagtagcagtatttggctactcagttggttattaactgtgctttttgactgataagagaatacatttaaattttttaaatggtatttatggggccaggtgtggtggctcacacctttaatcccagcactttgggaggccgatcaattatatagatcaacatgatcaaggtgggcagaccactcaaagtcaagagttcaagaccagcctgg

SEQ ID NO: 8990 - DNA, 494 bp, Homo sapiens
ccttatttctcttgtcctttcgtacagggaggaatttgaagtagatagaaaccgacctggattactccggtctgaactcagatcacgtaggactttaatcgttgaacaaacgaacctttaatagcggctgcaccatcgggatgtcctgatccaacatcgaggtcgtaaaccctattgttgatatggactctagaataggattgcgctgttatccctagggtaacttgttccgttggtcaagttattggatcaattgagtatagtagttcgctttgactggtgaagtcttagcatgtactgctcggaggttgggttctgctccgaggtcgccccaaccgaaatttttaatgcaggtttggtagtttaggacctgtgggtttgttaggtactgtttgcattaataaattaaagctccatagggtcttctcgtcttgctgtgttatgcccgcctcttcacgggcaggtcaatttcactggttaaaagtaagagacag

SEQ ID NO: 8991 - DNA, 376 bp, Homo sapiens
ccatcaactggaactatgtcattatttataaaacaggagcaatcacagggctgtggtgagaatcacatgaggtgacacatgtgaaatggtcctttcccctaagacatatataattgtgacaaggaacaaaatttacatagaaaataattacagaacaacgtaggaccatgtcttcatttctccctggagcggatgtaaaataaggtgattgatttgagcaagcatgttatgaatatttagaaatgtcttctagggaagcaagctggcgctcaccgattttggtttgccaggcatatcagaaggcactttgtgacaggtgcagtagggacgcggagtgatctcttcacgtgtaggcaatgcccagcccacacctagg

SEQ ID NO: 8992 - DNA, 173 bp, Homo sapiens
ccatgggggacgtgctgtccacgcacctggacgacgcccggcgccagcacatcgcagaaaaaaccgggaagatcctgacggagttcctccagttctatgaagaccagtatggcgtggctctcttcaacagcatgcgccatgagattgagggcacggggctgccgcaggcccag

SEQ ID NO: 8993 - DNA, 599 bp, Homo sapiens
cctaagtaaatgaagagctgtaccatattcatgtattggaagacaacattgtaaagatgacatggtttaccagattaatctataaattcaatacaaatccaatcaaaatttcaatgctcttgggtttgtttgatttataaattgttggtctaattctagaagtaatatggaggaacagttggctaagaatagccaagacactccaaggaagaacaattttgtggtgatactggagacagaggtgaaattggttacaattatgacaaaatgtggaggcatcttggtttttatcagaccttttcctaaagttgcaataatcaggactgtactgtactgctacaagattagacaaattgatgtcagtcagaatagaaaccatcaaaagacccacacacatacacaaaaatttaatttatgaaagaggcagtgttacaaatcactggggaaaggatgaacttttcagtaaatagtgcagagacaaccacttcgaatatgaaaaatgttaagttgaatttctaactcataattttcacaaaaatcagttcaggacagactaaagacaaatgtgaaaggcaaaactataaaatttccacaaggca

SEQ ID NO: 8994 - DNA, 597 bp, Homo sapiens
  unsure (592): n=A,T,C or G
ccaagaacctcttccaccgggccatttctgagagtggcgtggccctcacttctgttctggtgaagaaaggtgatgtcaagcccttggctgagcaaatttctatcactgctgggtgcaaaaccaccacctctgctgtcatggttcactgcctgcgacagaagacggaagaggagctcttggagacgacattgaaaatgaaattcttatctctggacttacagggagaccccagagagagtcaaccccttctgggcactgtgattgatgggatgctgctgctgaaaacacctgaagagcttcaagctgaaaggaatttccacactgtcccctacatggtcggaattaacaagcaggagtttggctggttgattccaatgcagttgatgagctatccactctccgaagggcaactggaccagaagacagccatgtcactcctgtggaagtcctatccccttgtttgcattgctaaggaactgattccagaagccactgagaaatacttaggaggaacagacgacactgtcaaaaagaaagacctgttcctggacttgatagcagatgtgatgtttggtgtcccatctgtgattgnggccc

SEQ ID NO: 8995 - DNA, 568 bp, Homo sapiens
cctggtcatagaagtgtaaacaatgtaaatgaatccaccattaccagttgtcatatcatatctatgtcacctgtgtattctgagattacacacatacctgccaatatacctgggaaaggttattttatcacagttacacttgagttcttggcaggcaggactgaggaagagtaatttgaaagaagttttacatcctatttagaagaaatcactagtatttccttaaataacaggttacaatagaaagatactgcctggaagttatcctttcactttggttcatttttagtttttctttatgatttacatagctgtttaattcatttgcttatagtacaatcctgccataaagtattaaagcacaagatacctattattccttcaacatctgcatttttcaagttttatactctacatccacagtacgtcagcagttcttgaatgtttaaaaaaataaatgggtaaaatgcttctaaaaaatgcagatgtttataactacaatggtactaagatgggaaggagacaatgagagaagggataaaagcaaacatgttcatgtgcagggaat

SEQ ID NO: 8996 - DNA, 436 bp, Homo sapiens
ctgagaatcctgggggagaaagaggccaagctggcccagcagagccaggccctacaggagctcatctcagagctagatcgaaggtgccacagctcagcactggaactgctgcaggaggtgataattgtcctggaaaggagtgagtcctggaacctgaaggacctggatattacctctccagaactcaggagtgtgtgccatgtgccagggctgaagaagatgctgaggacatgtgcagtccacatcactctggatccagacacagccaatccgtggctgatactttcagaagatcggagacaagtgaggcttggagacacccagcagagcatacctggaaatgaagagagatttgatagttatcctatggtcctgggtgcccagcactttcactctggaaaacattactgggaggtagatgtgacaggaaaggagg

SEQ ID NO: 8997 - DNA, 599 bp, Homo sapiens
  unsure (538): n=A,T,C or G
cctttctcaatttacagagttgaagaggaaaggcaaatggaggaataaacttcattgtcattgggattaatttggctagactcaatctcttgagccttaaaatgagaaagtaatatccattacatgtttagagttctcaaatagttgatactattattaaatgtttcaaattttattggggtagatactaaaaattagtacactgtcctaatgaagtttaaatgaacaagttttacatttcttaggattcaggaatatatggaatctagttgtatttaattgacttgagagccacagagattgtgttgatttatgagctggactcctattgttttagaaacatgcagtaatgattaacttgtgtcaatgatggtaatgagaccaaacttgtacatttaattaagggtaccagttctttttatgttactagactataccttggcctttaaaaatgaatctcactgattaaagagaacaggcattattaggatagcattccaccacaactagaaacattcaaataatgtgtcttaattgnaatctgtatataggaaaatttttcctatggatatttttggtgttttaccacagtgaactga

SEQ ID NO: 8998 - DNA, 411 bp, Homo sapiens
ctgtcctcacgggcccctggagaaaccgcaggtacacagatgaaggcatggacaggagaagaggggacccggggttgagaataagatagaaggcaaagagaactggggagcagaggagagaggagaaaaatgacacctccggtattgactgctcagtggtacctactggcgctaagcacagtaaaaacacaaaggctactttccaaaaggaaaacaacatcatttaaaaagaaaaagaaaaaaaaccaaaacagccctattcgcccatgagtgtgggaagtgaggaaattatataatacgcctcctccaaggaccccaaacaccctctctgctgtaattaagagaagtgcttactgccagcaccgtcctgccatacctgcttgtgtgactttgaacaagtgtcttatcctc

SEQ ID NO: 8999 - DNA, 381 bp, Homo sapiens
tcgacatttgggggcaagggttccactgaaaaatcccccaaattcacgctgaggtttcaggtcatggttgctgaggtggaagatgaggtcagggctcttggagattttccaacccaccctagaacttgtttctaaatggctggggaagaggtcagtataggtccccccgttactgcagatgaaggcagaagtcattctctcccccacccctcaacttcttcagagatgtggagataggaggcttcgatctctaattgcctacgatctcttaaaaatataaaacacgtgcagttgactttggtacaaaaaagaaaacaaaagaacaacaaaacattctggtccctgtgggttttttccctcacccccaacaaaccattatgg

SEQ ID NO: 9000 - DNA, 372 bp, Homo sapiens
ctgcggttcaagaaaaggtccaaaggaggacccactcgaggtgaggataaatcacaattgtgatcacagaccaggtttctatcttttttattccctttaataaattgggcttgacctgaaactccaagaaagttaatttataacagccaaaataattttttttacgtaacagcccacctttctttttcttttaaacttaaaccattatgacaaatggagatttattacataccataaacacatgtggcttgagcactggtatttagtctggaaactcagatggggcagtaagctgctgctgcaatcaggaaatgccatgtgacattcttgataaagacgaaacacacacacattccacagcacttattgtgg

SEQ ID NO: 9001 - DNA, 375 bp, Homo sapiens
ccatcaactggaactatgtcattatttataaaacaggagcaatcacagggctgtggtgagaatcacatgaggtgacacatgtgaaatggtcctttcccctaagacatatataattgtgacaaggaacaaaatttacatagaaaataattacagaacaacgtaggaccatgtcttcatttctccctggagcggatgtaaaataaggtgattgatttgagcaagcatgttatgaatatttagaaatgtcttctagggaagcaagctggcgctcaccgattttggtttgccaggcatatcagaaggcactttgtgacaggtgcagtagggacgcggagtgatctcttcacgtgtaggcaatgcccagccgacacctag

SEQ ID NO: 9002 - DNA, 596 bp, Homo sapiens
ctgcacatggattggttaacataatatatactgctatataatcttttaagggctaatatttgtagataatttaaaagcatgtcaatttcctctaagatttgattatttaacctgcacaaaggccaatcttcagttatcaatgacaagaaaactctagggctgccaaaataacttcattttagaccccagagttagtgttaggctggtaatgtttctaatttgggaataatgagactagaaagctaggagggccccctccaaatttctcccttgtattaggctgaagtagaacataacgtggcttaaagcataaacttaaagcatatgctttgagttttaaaaatgttaacctgtaattaattattagagtattatccatagtctactatgatagtcagttaatattctctaaatcagattatattcatttgaaaatgcatctgcatatttgcaaatgtgttattacacaagatcttacctatgtcaatttaaagaggttaaagatgcaggaagcccccactaaaatgtaaacacatttgtacggttttcagaatgtttggactcattctttcccattgacagagcagtaggtttta

SEQ ID NO: 9003 - DNA, 599 bp, Homo sapiens
  unsure (547): n=A,T,C or G
cctatgcatagttaataaggttataatctactcaacatggaaaatggagcctatttgcaaacacacaagtaattaaagtaccaattctctcttagtttctttttttatagttggtttattttgcaattataaatgttaaacatccctagagatgaaagttaaaatggttgatcacagatcagtagcaaaatacaaattgacaattcaaaattataaataaaactctgttgaggatgtttaactttgagtctccaaatttaagagctaagcttggaagaaacaaatttataggttatatttccctcttaaattaaaaaacaaacttcctctggcagtagtttgtgaattcctttcattgtaatgataccatgattacaggatcaaaaatgcttaacttacttgccattctgctcacatcatcacagttgtttttttttttttaagcactcaatgtaggcattttaatcttctggataacagagtatcttttgagaaattaaaatcgaattgaccatttgcaatatttggttttcctaataggtactgncttagtaaatgtttaaatccaaacaaatcttctgttcaccggaaaaatacta

SEQ ID NO: 9004 - DNA, 602 bp, Homo sapiens
ctgtagtgcccccccctccactttggtaaacgactcaagttccatgaggactttcacttctttatttataatcacagaagtgaggtgttacttcacacacatacacacacaaagaatgaaataaagaaatgaaactcgctaagcagacaaaaacagacaactttctgcttagaaaacagccttctcggtgggagaggatgaactgccatgtctaagagaaagacttgcccccgaatttgtaggtctgtaactgaccaagttttgtaattattaacaggtatttgccaagtcctaattgctgaatataatgaattggaactagatgcgaaaatagagcaggacctctccccttgatgagtttttattccagccatataattctcaataaaacttttcctgggctggatagcaaaggacacctttggttacctgaatgaacaggtacaggggaaattatttgggggagggaaaaaggagagaaaagcaaggagagagagtgtgagtgtaagagaaagtgaagaagccactcttgagaaaagcttgccataaaggagctaaacccacctgaaattcctacccacggacaccccttctcacttcag

SEQ ID NO: 9005 - DNA, 390 bp, Homo sapiens
aaacagaggcttgcgataggcttttggctcatcgagtggaaaccaaaatgaagggaaataaagtgaatgaggtgctgaatagactgcacctggctatcccaaccaggagggacgataagaagaggccccctttcatccctgaaggagtggtggctcgcaggaagaggatggaaactgaggagtccaggaagaagagggaacgagatcttgagctggaaatgggagatgattatattttggatcttcagaagtactgggatttaatgaatttgtctgaaaaacatgataagataccagaaatctgggaaggccataatatagctgattatattgatccagccatcatgaagaaattggaagaattagaaaaagaagaagagctgagaacag

SEQ ID NO: 9006 - DNA, 589 bp, Homo sapiens
ctgcacgcagccatggctgacacattcctggagcacatgtgccgcctggacattgattcaccacccatcacagcccggaacactggcatcatctgtaccattggcccagcttcccgatcagtggagacgttgaaggagatgattaagtctggaatgaatgtggctcgtctgaacttctctcatggaactcatgagtaccatgcggagaccatcaagaatgtgcgcacagccacggaaagctttgcttctgaccccatcctctaccggcccgttgctgtggctctagacactaaaggacctgagatccgaactgggctcatcaagggcagcggcactgcagaggtggagctgaagaagggagccactctcaaaatcacgctggataacgcctacatggaaaagtgtgacgagaacatcctgtggctggactacaagaacatctgcaaggtggtggaagtgggcagcaagatctacgtggatgatgggcttatttctctccaggtgaagcagaaaggtgccgacttcctggtgacggaggtggaaaatggtggctccttgggcagcaagaagggtgtgaaccttcctgggg

SEQ ID NO: 9007 - DNA, 380 bp, Homo sapiens
caaacatgatcatcgttggagccggaggtggcaggagtcgaggcgctgatccctaaaatggcgaacatgtgttttcatcatttcagccaaagtcctaacttcctgtgcctttcctatcacctcgagaagtaattatcagttggtttggatttttggaccaccgttcagtcattttgggttgccgtgctcccaaaacattttaaatgaaagtattggcattcaaaaagacagcagacaaaatgaaagaaaatgagagcagaaagtaagcatttccagcctatctaatttctttagttttctatttgcctccagtgcagtccatttcctaatgtataccagcctactgtactatttaaaatgctcaatttcagcaccgatgg

SEQ ID NO: 9008 - DNA, 218 bp, Homo sapiens
  unsure (11): n=A,T,C or G
  unsure (35): n=A,T,C or G
  unsure (124): n=A,T,C or G
  unsure (173): n=A,T,C or G
  unsure (183): n=A,T,C or G
  unsure (186): n=A,T,C or G
ccatcatcctnttcccctttgggttcatttgctgntttgccttgaggaagcgacgatgccccaactgtggagccaccttcgcttaaagggaacaccaggcccggctttcctacacccagctctntttttctaatgtaaatgttgtgtacaatagttttatttgattaagcttnaggactgttntgnaaagcgaggtgggaccgatgtggcacacgcca

SEQ ID NO: 9009 - DNA, 364 bp, Homo sapiens
  unsure (14): n=A,T,C or G
  unsure (130): n=A,T,C or G
  unsure (321): n=A,T,C or G
gtatatcttctttnatgaacatctctttaaaagttttgtaccatttttaaggtcaggttatttatttatcatcagttgtagcagttctttatgtattctggaaccaagtctattggattccaaatacggnattttctttgtatatatggtaaatagaatactttctcttttaagtcataagatatattttaagatattaaatgactaaaattatttaggtcataagttaaatatttttttcctgtggtggtattttttaatcccttctttccacctagtcactttttggaatatctgtagcaataatagtaggaacagtanatgtgcctttggagtgaaaataaatagccatttaaaacatagg

SEQ ID NO: 9010 - DNA, 597 bp, Homo sapiens
ctgggaagccacgagaatattgtgaacctgctgggggcgtgcacactgtcaggaccaatttacttgatttttgaatactgttgctatggtgatcttctcaactatctaagaagtaaaagagaaaaatttcacaggacttggacagagattttcaaggaacacaatttcagtttttaccccactttccaatcacatccaaattccagcatgcctggttcaagagaagttcagatacacccggactcggatcaaatctcagggcttcatgggaattcatttcactctgaagatgaaattgaatatgaaaaccaaaaaaggctggaagaagaggaggacttgaatgtgcttacatttgaagatcttctttgctttgcatatcaagttgccaaaggaatggaatttctggaatttaagtcgtgtgttcacagagacctggccgccaggaacgtgcttgtcacccacgggaaagtggtgaagatatgtgactttggattggctcgatatatcatgagtgattccaactatgttgtcaggggcaatgcccgtctgcctgtaaaatggatggcccccgaaagcctgtttgaaggcatctacacc

SEQ ID NO: 9011 - DNA, 599 bp, Homo sapiens
ccatagaggacgtggaggattcaatatgcgtggtggaaatttcagaggaggaggcaagttaattttgagtgttctgtatttagttcaggatcgaaacaagtgataattttatagtttggatgtagctgaagtttcttcctcattaatggtatactgtcacagtaactaaagtattcatgtgatttgatattaaatacacctaggttatgttaatggttagaattaaacatttcttttgtctttaaacaattatttttggagaaaaaggaacaatctagaggaatcctaagtcttctgtataagtagggtacaatatacaatgaaactaaaacagctcttgtcttttagcccctgggaatcgtggcggatataataggaggggcaacatgccacagagaggtggtggcggtggaggaagtggtggaatcggctatccataccctcgtgcccttgtttttcctggccgtggtagttactcaaacagagggaactacaacagaggtggaatgcccaacagagggaactacaaccagaacttcagaggacgaggaaacaatcgtggctacaaaaatcaatctcagggctacaaccagtggcag

SEQ ID NO: 9012 - DNA, 468 bp, Homo sapiens; identical to SEQ ID NO: 4911

SEQ ID NO: 9013 - DNA, 594 bp, Homo sapiens
ccatctattacactacaaagtagtataatgcaaataaatagaattctatccaggttaaaggttaatagcattagattagcacagtaaggtatgactaagtaattagaacagattttaaaatattttactacattaagaggctggagatatatgtgtgtgtgtgtgtgtgtgtgtgtaattagagatcccatgtcatcagaagcatatatttgacacagccagcctacagtggaatgcagtctcatagaacaataaagctggtcagtctaagtaacatcatgtttgagcagtttaaaacaatgactttcagcgatgaaaccaaaaattcagattttccagtgattcaaagtacttatttcctgcatttaaaaataacttcataaaacttgaaattgatgaagcacaaaccagccttagtttaggtaggggtataacagataaaataacttttaagtgttcatgtgcagatgatttgcttgaccccaccctttgcattttgtgttgaacttagaggtgtcttgctttttttaatatgtcaaataataaagaattaggaaatctgatactttttttttgactcttgctctgtcaccc

SEQ ID NO: 9014 - DNA, 599 bp, Homo sapiens
ctgcaatttgtcctttaaggatgcctcacaaggatattatgtccaggtagctagtccatttatatcggggaccagttgtccttttgttgtttgtggctgtttattaaatgtagtggcacaactttgttgtgaatatgtaccatcatttgctacaatctagacagatcatcctgtctacaaaaaatcattttctacatttctaagaccattatcagtttatctgctcctgctagaaaaggacatactttttgtcaatttacattaacaaaggctctgctactccccatttactcgctgcaatgaaaactggtaagccaagggtaaagcttaagtatcagggactatgaatttagggtagaagtgaaaataaccaaagtggaactaaatcccctattctggagtgcaactgagatcaagtaaacttcgctggactttcttcttaactataaaactattaaccagaaggtaaagtcacacaattttacctcccaacaaacttttaaaataaaaatttccaaaaaatttagatgtctaggttttgttatatcttaccaagagttacacagacataaatttgtatttaacttcagttaaacatc

SEQ ID NO: 9015 - DNA, 562 bp, Homo sapiens
  unsure (450): n=A,T,C or G
cctgtttgattgtagctatgttggtgtatctcgtgtacaagatggaaaagtgcttttgttgttctacctgatccagttgggggagcaggaatagggggtgcctgcctaacggcctctagcccatgtgcttatactgggatctgtcccgagggatctgcacctggttggcagtcattttgtggtggacgtggtaaatcgcgagtgttaccatgatgacgaggcccaagatgagccccaaaatcaggggcaaggtttcttccagttgctcccgctcatccactgggcatttatgctcttcactgaagacaaaatctgagataatgtcaaaaggttggatgtggaccgcagacaggatcatggtgaccgtcttctgcggatcactagaggccagtgaaatggtttgttgagcttgacactcataggacttcccagcgggggtgaccaaggcanagaggtggtgcgagttggctgtgtgcttcccagcactgactgcgtctttgaagtgggttttctccgaggagtcgtagacaaactgcactttgctcagcctccaagtcgcctc

SEQ ID NO: 9016 - DNA, 598 bp, Homo sapiens
tttttttttttttttaaggacaactttttattgctaccagaggcttttatcatcagtacacagttctgactgcaatacctttttcagactgcaaagggaactcaggatccagaagtcattaaaagaaacataaggctggggaggcagggggagtaagttctattagaaaatcctaatagcttaacaaaactagggtactaaattcagttataacatgttacagacttaaatcatagagctgccccaacatctagacagtctctcctactgattataaatgagtgaaaactatcagttagaaaaatctaatttaagttgttaatacatgtttctttggtgagcacctggatatatttatcacaaattcttttatacaaatgtcgaaaatgctttcaacaaacctaagtgtcctaattacatgccacttttaagcatcactttaaggtaaacaaaaatgaaaaccataattttaaattaaaatttgaaatgagacacaaaatcaacctggtaatatgagaactttttcttttgccatctctgattaatatgggacaattccaaagtacccttttcagactaattggaacttgagtcatgg

SEQ ID NO: 9017 - DNA, 528 bp, Homo sapiens
agataaagggttttgaacatgaaatgacaaaaacaacagcaagaagaaaattcttgtcctttttcattactatcagactcaaataaatgtcttggctcttacattacattcattcttcaaccattgtggtctggcttccacttccttcacttcaccaacatggctctgccaaaggaagcccgtgatctctaggccatcactttaattgatctctctacaacatttatcctggttgttaagccctccttacaacattcttctctctttgtttttatagctccatctctcctgcttctttaacttgataatgcatacttgatttttctatttgttatttcataaaccaattaatacacagataaaatgactgtatatcaaaccatgtttgtatagaaaaatggattttggatgcctctcatatgtaattagttctattaaacatattaattgtattgtttaatttgtcaggtttttgacagaattttgtttacaagtaataaaaattttatctccaatttccaaaaaaaa

SEQ ID NO: 9018 - DNA, 469 bp, Homo sapiens
  unsure (8): n=A,T,C or G
ctgcgttncatgtaacaaaagatgcaaacaaaatagattcaagttgttttgcagacagcacaatgatacaatattaggactacagaatctcagagtaaaccacaatgatttaaaggtaagatacacagaaataaaatgattttaacagaaaaatatgacattcctgaccttaggtctgggcacatgatgtctgacccctatagaggcaccttggctaaaatggaaatgacctagtgccatggctgacctcacttgtgcgttgctgagcccatatgtgaacaaatccccttgatacagcaccatggtaggcatgagaggagaagtgttttaactattctcttatgaattgtaaccaacccttattatctactgatggatggacagggggtggggtgatcatacaggatggcagacattccaagtactcttcaccccagtgtggacggaacagaatctggctacacggtgg

SEQ ID NO: 9019 - DNA, 327 bp, Homo sapiens
  unsure (11): n=A,T,C or G
  unsure (33): n=A,T,C or G
  unsure (37): n=A,T,C or G
  unsure (38): n=A,T,C or G
  unsure (128): n=A,T,C or G
  unsure (139): n=A,T,C or G
  unsure (230): n=A,T,C or G
  unsure (270): n=A,T,C or G
  unsure (295): n=A,T,C or G
  unsure (296): n=A,T,C or G
  unsure (301): n=A,T,C or G
  unsure (305): n=A,T,C or G
gactacattcntcttattgctgcagtgaaaggngtgnntgaccatcgaatgaagtgctggcagaaatgggaagatgctcaaattactttgctcaaaaaacgtgaagctgaagcaaaaatgatggttgntaacaaaccanataaaatacagcaagctaaaaatgaaataagagagtgggaggcgaaagtgcaacaaggggaaagagattttgaacagatatctaaaacgantcgaaaagaagtgggaagatttgagaaagaacgagtgaangattttaaaaccgttatcatcaagnncttanaatnactagttcaaacacaacaacag

SEQ ID NO: 9020 - DNA, 138 bp, Homo sapiens
ctgcccaaaaggtgtcccatctcttgggtatcaatgtgaccgatttcaccagaggaatcctcaccccgcgcatcaaggtgggacgggattacgtccagaaggcgcagactaaagagcaggctgactttgccatcgagg

SEQ ID NO: 9021 - DNA, 556 bp, Homo sapiens
ccacctgtctgcaagagaggcggcccctgtgcttgcaacgcttacgtgttgatcccagtgtccttttccaaatgagtgctgtagctttagaagtggccctctatagaaagaagtcaaaagatgaggccccttctagaatctaggataacaagagtgttgacagtttgaggagtcgaattgagattcatcatcaaagagcaatgcagcgtcgttaaaataaaaactgtgccttttaaaaagaaaaatgcaaatatagagcaaatccctaaacttgaaccatttcctagtgccttgctagacaaacataaaggggcagggttgtggggaagggaacgtttttggtggtgtgtgcagttcctactggatgagtgtgtgtttcttaatgtctcatttcaagcaggagatgttgggtctggagcaagatctgagactgcgatgtcccccaagggtgacaggtcagatttatttcagtcagtgcaagtcacactccaaactaaaggctgggcagtgcgtttagtctgtggcctagaagacctcatcagcccccgagaggagg

SEQ ID NO: 9022 - DNA, 224 bp, Homo sapiens
ctgaacatctgtttttagcaccatgcctcccttcctccttcaacctcctgatatcactgtcgtctcctctgcaggtgctttggttttgcccttctggtactaagttactgtatcatatgctttctgtttcagattttatggtttaaggtaactgatgagatctacctctgacaaaaagagttggaatttttgtttctatttcctttgttttatgctaagatttt

SEQ ID NO: 9023 - DNA, 569 bp, Homo sapiens
ctgggagagctagactaagttggtcatgatgcagaagctactcaaatgcagtcggcttgtcctggctcttgccctcatcctggttctggaatcctcagttcaaggttatcctacgcagagagccaggtaccaatgggtgcgctgcaatccagacagtaattctgcaaactgccttgaagaaaaaggaccaatgttcgaactacttccaggtgaatccaacaagatcccccgtctgaggactgacctttttccaaagacgagaatccaggacttgaatcgtatcttcccactttctgaggactactctggatcaggcttcggctccggctccggctctggatcaggatctgggagtggcttcctaacggaaatggaacaggattaccaactagtagacgaaagtgatgctttccatgacaaccttaggtctcttgacaggaatctgccctcagacagccaggacttgggtcaacatggattagaagaggattttatgttataaaagaggattttcccaccttgacaccaggcaatgtagttagcatattttatgtaccatggttatatga

SEQ ID NO: 9024 - DNA, 356 bp, Homo sapiens
  unsure (328): n=A,T,C or G
ctgatgaaggcatctgatgccttcatctgttcagtcatctccaaaaacagtaaaaataaccactttttgttgggcaatatgaaatttttaaaggagtagaataccaaatgatagaaacagactgcctgaattgagaattttgattttttaaagtgtgtttctttctaaattgctgttccttaatttgattaatttaattcatgtattatgattaaatctgaggcagatgagcttacaagtattgaaataattactaattaatcacaaatgtgaagttatgcatgatgtaaaaaatacaaacattctaattaaaggctttgcaacacanaaaaaaaaaaaaaaaaaaaagggggggg

SEQ ID NO: 9025 - DNA, 564 bp, Homo sapiens
ctgggaagccacgagaatattgtgaacctgctgggggcgtgcacactgtcaggaccaatttacttgatttttgaatactgttgctatggtgatcttctcaactatctaagaagtaaaagagaaaaatttcacaggacttggacagagattttcaaggaacacaatttcagtttttaccccactttccaatcacatccaaattccagcatgcctggttcaagagaagttcagatacatccggactcggatcaaatctcagggcttcatgggaattcatttcactctgaagatgaaattgaatatgaaaaccaaaaaaggctggaagaagaggaggacttgaatgtgcttacatttgaagatcttctttgctttgcatatcaagttgccaaaggaatggaatttctggaatttaagtcgtgtgttcacagagacctggccgccaggaacgtgcttgtcacccacgggaaagtggtgaagatatgtgactttggattggctcgagatatcatgagtgattccaactatgttgtcaggggcaatgcccgtctgcctgtaaaatggatg

SEQ ID NO: 9026 - DNA, 592 bp, Homo sapiens
ccacagtcttatatttttaatttgaatttactatctcctaagctagttgttttcaactatggagttttataaaaaataaaatgcctaggccctactgctgaatctctttacttcatatatttggtatattatgtctcataattgttatatctcaatttatttttctatataaaaattgtgttcctccatttttataaatcagatttttttaatgcaaacttaattattatccttagagacaacttgcctatttttttattttattttttggaatggctttattatctttggcatgctacagaagcaaccacatttctttactggttgcattataattatgcacccctcatctgacctgtcacatttgagggttaccagttataaattaaaaacagccactctaagtctctgtcatctacagatttttttttttcactctgaggcttgtgtgaatgccctggtataagctacaggccagattttgtgtcttcagccaaggacagtttcaggcttgtgtgaaggccctgctataagctacaggccagattttgtgtcttcaaccaagaaagacagtctcagagcttcatggaga

SEQ ID NO: 9027 - DNA, 328 bp, Homo sapiens
ctgtagagtgggcttatcatctttcaacacgcaggacaggtacagattcttttccttgaggcccaaggccacaggtattttgtcattactttcttctccttgtacaaaggacatggagaacaccacttgttgctccatatcctgtccctggaggtggagagctttcagttcatatggaccagacatcaccaagcttttttgctgtgagtcccggagcgtgcagttcagtgatcgtacaggtgcatcgtgcacataagcctcgttatcccatgtgtcaaagaagataggttctgaaatgtggagcacatgttgtttaggtataaaatca

SEQ ID NO: 9028 - DNA, 598 bp, Homo sapiens
  unsure (577): n=A,T,C or G
aaaagtgtgacgagaacatcctgtggctggactacaagaacatctgcaaggtggtggaagtgggcagcaagatctacgtggatgatgggcttatttctctccaggtgaagcagaaaggtgccgacttcctggtgacggaggtggaaaatggtggctccttgggcagcaagaagggtgtgaaccttcctggggctgctgtggacttgcctgctgtgtcggagaaggacatccaggatctgaagtttggggtcgagcaggatgttgatatggtgtttgcgtcattcatccgcaaggcatctgatgtccatgaagttaggaaggtcctgggagagaagggaaagaacatcaagattatcagcaaaatcgagaatcatgagggggttcggaggtttgatgaaatcctggaggccagtgatgggatcatggtggctcgtggtgatctaggcattgagattcctgcagagaaggtcttccttgctcagaagatgatgattggacggtgcaaccgagctgggaagcctgtcatctgtgctactcagatgctggagagcatgatcaagaagccccgccccactcnggctgaaggcagtgatgtgga

SEQ ID NO: 9029 - DNA, 576 bp, Homo sapiens
ctgaaaatcttttagtaaaagctttaaagatgagcccatgaattcactttaaatttcaccagttaaattaggtcaaatggaaggaactcaaatgagtattgcccaatcagagcccattatttgtaagtcatcagtaaccttaaaactccacttagacctaattattgaaaacttgcatataatgaagtgaaagaatttccattcatcaacctctcaatcccaggttttcaaagaaaaacctatctaaggaatacttaccaaaatcagataagaaaatttaaacctgcatagttatcagatttgttccactacaaccagtctgcatacagttacacatcaattcgttctgtatacactctagaactgaacagaacaaagtttagcatagaaaagctgtaagaaacaggttcctaattacggaagttgcaaagttcaaaagggtatgaaaaaaactaatgtaaattcgatacttccttcgtttcaaagaaatagactttctgtaaaaatatatacaatttttacaaatacatttacaagctgtcttaagaattgaggatatccatattcataactaat

SEQ ID NO: 9030 - DNA, 597 bp, Homo sapiens
ctgtggctgtctgtcagagaagcacatttttctgcagataattagaatggcttcccccatctctcacggactgtcccaagtctagaaaagaattgagttcctcttctattagtcaaataaaagggaagagaatgtttgtcttcctttcctttctgtagtgttaagaaaataaacgaacttaatgattctaaattatcagtgagcttaacactgtactatagaccaaagattaccttttcaaaaagtcctttgaggtgaaatattttgtatacgtaatacatagatgcacatataaacacacacatatagaatctcaatattttaacacttctttgggtagttgtactaactcactaaccctgaggaaaaagttaagaaattgaaagtgttttcttcaaaagttgagatttaacaataaaaggtgttactttgataactaaaaggaactttattatcctcttcctaaaataaaccaatgcctattctgaaaatggcacttgcaattacaatttgccattatcaaagctaccactgaggtagaggcattatctaaaacaaataccacttatcatttattggcagttacctcgagaggga

SEQ ID NO: 9031 - DNA, 581 bp, Homo sapiens
ctgggaagccacgagaatattgtgaacctgctgggggcgtgcacactgtcaggaccaatttacttgatttttgaatactgttgctatggtgatcttctcaactatctaagaagtaaaagagaaaaatttcacaggacttggacagagattttcaaggaacacaatttcagtttttaccccactttccaatcacatccaaattccagcatgcctggttcaagagaagttcagatacacccggactcggatcaaatctcagggcttcatgggaattcatttcactctgaagatgaaattgaatatgaaaaccaaaaaaggctggaagaagaggaggacttgaatgtgcttacatttgaagatcttctttgctttgcatatcaagttgccaaaggaatggaatttctggaatttaagtcggcccgtctgcctgtaaaatggatggcccccgaaagcctgtttgaaggcatctacaccattaagagtgatgtctggtcatatggaatattactgtgggaaatcttctcacttggtgtgaatccttaccctggcattccggttgacgctaacttctacaaactgat

SEQ ID NO: 9032 - DNA, 587 bp, Homo sapiens
ccagttttcatacagtctcggggttttaaaactttgaaatcaaggacacgacgtctccagtctacctccgagagattagctgaaacacagaatatagcgccatcattcgtgaaggggtttcttttgcgggacagaggatcagatgttgagagtttggacaaactcatgaaaaccaaaaatatacctgaagctcaccaagatgcatttaaaactggttttgcggaaggttttctgaaagctcaagcactcacacaaaaaaccaatgattccctaaggcgaacccgtctgattctcttcgttctgctgctattcggcatttatggacttctaaaaaacccatttttatctgtccgcttccggacaacaacagggcttgattctgcagtagatcctgtccagatgaaaaatgtcacctttgaacatgttaaaggggtggaggaagctaaacaagaattacaggaagttgttgaattcttgaaaaatccacaaaaatttactattcttggaggtaaacttccaaaaggaattcttttagttggacccccagggactggaaagacacttcttgcccgagctgtggcgggaga

SEQ ID NO: 9033 - DNA, 574 bp, Homo sapiens
cctcaatgacaagatgtttgagcatgacttccgttggactgatggcagcacactggtaagatgcccttgaaaatgatgtcaagttctaccttctggaaatttggtactgtgcactgattgtgcattacagagggtgcattagactggaggcaagttaaatgacttgctcaaggtcactcagtgaaacagagaagggttagaagagttccaagctacctgatccaacatccagtcctctcttcaatagttgtggttctcttcaaaagaggagtgtaccagatttctatcaaaccagaaaaccagacaattagtagaattgccttgggtctgtctttcagatggttatctttgctttttctagcttcagagcaaaaagagaagaataaaatgtagcagaaaaagtcattttaaaaaaatacctttccgtcttaaataattcactggaaatccgctataaggcatgactcatttccaagcaaaaatatccatttatttttatcttaaagaagactgttgatatgatcttgtgaatttctgccaactaattacatatttcaacttgttttctattttt

SEQ ID NO: 9034 - DNA, 449 bp, Homo sapiens; identical to SEQ ID NO: 8473

SEQ ID NO: 9035 - DNA, 109 bp, Homo sapiens
  unsure (95): n=A,T,C or G
  unsure (99): n=A,T,C or G
ccagtggaatgatgttccctgcaattaccatctcacctatacgtgcaagaaaggaacagttgcttgcggccagccccctgttgtagaaaatgccnaganctttggaaag

SEQ ID NO: 9036 - DNA, 538 bp, Homo sapiens
ctggcaatgacaagactgggagtatcaaactaggattgttagttcaattaaaatttcagataaacaataatgtacttatactaaaaaattatttgttgtttatctgaaatgaaaatttaactgggtacccaattgtttgtttgtttaatctaaaaaccctgattgaaatttatctaataaaacatcatttaatatctaaaataaaataaatttactataacatctttataactattcaatcaatgattcatcttctatttttccaaattcttgcacaaatatttgatgcttaaataaatacataaataataaataggttaataagttacacttgaaaataatttatgttatgatgaaaaaacttaaagtgcttccacatgtcctcacaacatcactgtgaggtaagatggtggctaatactttttccacttagaaataaaggagaaaccaaggcacagtggaacaaggacttgtggatcctggctagcagagtagggttgccagatttaacagaaaaaaatccaggatttccagctaa

SEQ ID NO: 9037 - DNA, 521 bp, Homo sapiens
ccatcggtgctgaaattgagcattttaaatagtacagtaggctggtatacattaggaaatggactgcactggaggcaaatagaaaactaaagaaattagataggctggaaatgcttactttctgctctcattttctttcattttgtctgctgtctttttgaatgccaatactttcatttaaaatgttttgggagcacggcaacccaaaatgactgaacggtggtccaaaaatccaaaccaactgataattacttctcgaggtgataggaaaggcacaggaagttaggactttggctgaaatgatgaaaacacatgttcgccattttagggatcagcgcctcgactcctgccacctccggctccaacgatgatcatgtttggatgtatttattgaattgtcctttgctgatgaggaatttttaaagtatttcatagaataagtcctttggtatgcagatgctacatggaaggaaagaaagaaaaaaagaaaacacacaatattacttgctccatgccctaaa

SEQ ID NO: 9038 - DNA, 525 bp, Homo sapiens
ccaaataactcccaaatgaaacactcaacccaaggatgttttcagcccactgttagtgaagctgggtgcagaatgcaaagcctctaaaaggagaggatacaaagtcaggtgagtaggggccattggcaatgctcagagccagccagactccaaacagggagcccaagtggtttttttctgggacactctacttgaattattgtttaattagtcaaccatagatcttcaaaagagaacaattagttaacatgataaaaagtgactgcattctttggactgtatcataattatagtaagcaaattctgacagttttaatgaaaatagcctccaccattttgcaggtatgaagataacttaattatccacagggcttttaatgtctgctggacaatacatgaatgataagctataaatgacattgttttatgatataaaaatactagtttttttcatttattatttctataggcattcactgtttgagtcaaggttaggcttgttaagtgattaaaggcaattttatt

SEQ ID NO: 9039 - DNA, 371 bp, Homo sapiens
cctcgagtgcgatatggcaaagccaaagctcccatccaagacatctggtaccacgaggatcggattagagcgtgagtgctcagccctgtagtggacaggaggcaacagaacttcagaagggaaggtttcggtagcagtctgggaattcaaacatgaaattgagtcaggggtttgccctgtggagaaggcttatctagccaaattagggaggcagcaccccttcctcatagtgaaactgaagttctgaaaagtggaatctggagcccagcaaccgaaagatcattgcaattatagccgcatgtttctgggcatctgctttgggccaggcactgtactaagctctttgcaagcattatctcattctctaaagg

SEQ ID NO: 9040 - DNA, 590 bp, Homo sapiens
  unsure (505): n=A,T,C or G
  unsure (547): n=A,T,C or G
gccacactctacttctgcttctgccacctatggggtcgaggcaggtgtggtgccttggctaagtccacagacttctgagaggcccacgctttcttcttctccagaaataaaccctgaaactcaagcagctttaatcagagggcaggattccacgatagcagcatcagaacagcaagtggcagcgagaattcttgattccaatgatcaggcaacagtaaaccctgtggaatttaatactgaggttgcaacaccaccattttcccttctggagacttctaatgaaacagatttcctgattggcattaatgaagagtcagtggaaggcacggcaatctatttaccaggacctgatcgctgcaaaatgaacccgtgccttaacggaggcacctgttatcctactgaaacttcctacgtatgcacctgtgtgccaggatacagcggagaccagtgtgaacttgattttgatgaatgtcactctaatccctgtcgtaatggagccacttgngttgatggttttaacacattcaggtgcctctgccttccaagntatgttggtgcactttgtgagcaagataccgagacatgtgact

SEQ ID NO: 9041 - DNA, 334 bp, Homo sapiens
ccagcatcctcttggatctgcagttaggctcaacacattccagccttagcacaatcttctttgtggtcttagccttcttccggaaaattggctttgtctgcccaccatagccactctgcttccgatcatagcgcctccttccctgggcatacaaagaatccttgcccttcttatactgtgtcactttgtgaggctgatgcttgccacacttcttacagaaggttcttcgggttttaggtacgttgaccatctttgcagcagggctgttttgtctatatgatgaaaacgagaaacagcgcccgacacctggcccttcgcagctctcgcctttcgc

SEQ ID NO: 9042 - DNA, 597 bp, Homo sapiens
  unsure (127): n=A,T,C or G
  unsure (134): n=A,T,C or G
  unsure (146): n=A,T,C or G
  unsure (456): n=A,T,C or G
  unsure (537): n=A,T,C or G
  unsure (557): n=A,T,C or G
ccatcggtgctgaaattgagcattttaaatagtacagtaggctggtatacattaggaaatggactgcactggaggcaaatagaaaactaaagaaattagataggctggaaatgcttactttctgctntcatttnctttcattttgnctgctgtctttttgaatgccaatactttcatttaaaatgttttgggagcacggcaacccaaaatgactgaacggtggtccaaaaatccaaaccaactgataattacttctcgaggtgataggaaaggcacaggaagttaggactttggctgaaatgatgaaaacacatgttcgccattttagggatcagcgcctcgactcctgccacctccggctccaacgatgatcatgtttggatgtatttattgaattgtcctttgctgatgaggaatttttaaagtatttcatagaataagtcctttggtatgcanatgctacatggaaggaaagaaagaaaaaaagaaaacacacaatattacttgctccataccctaaactgccgataccacagncgtaaaatgaaggtgtctantagttgttatagcacggtagtccattctttctaaggacca

SEQ ID NO: 9043 - DNA, 337 bp, Homo sapiens
  unsure (116): n=A,T,C or G
  unsure (120): n=A,T,C or G
aaaagattgatcgccgttctggtaaaaagctggaagatggccctaaattcttgaagtctggtgatgctgccattgttgatatggttcctggcaagcccatgtgtgttgagagcttntcanactatccacctttgggtcgctttgctgttcgtgatatgagacagacagttgcggtgggtgtcatcaaagcagtggacaagaaggctgctggagctggcaaggtcaccaagtctgcccagaaagctcagaaggctaaatgaatattatccctaatacctgccaccccactcttaatcagtggtggaagaacggtctcagaactgtttgtttcaattgg

SEQ ID NO: 9044 - DNA, 265 bp, Homo sapiens
  unsure (94): n=A,T,C or G
ccttcaaagaattcccatccagtccaagtggggaggatcatactagaagactaccatgatcatggtttactgcgcgtccgaatggtcaaccttnaagtggaagattctggactgtatcagtgtgtgatctaccagcctcccaaggagcctcacatgctgttcgatcgcatccgcttggtggtgaccaagggtttttcagggacccctggctccaatgagaattctacccagaaggtgtataagattcctcctaccaccactaagg

SEQ ID NO: 9045 - DNA, 300 bp, Homo sapiens
ctgccacatccctgggcttacggtgcagcaggtgcttttttcaagacaggaatcaaaatgttaggaacacggcagaaaggggacacctggagaccaaacgcaggatgaggagttctgcagaggtcacagggaagtcacagaacagtaatacgctagcaggggcatggggcgtgaagaacagaagaagagaggaagcgtttccaagcctccagagaagaaatcaaggccaaccaaagcttcccgggtcacagaaccaattcttttaccaggcagtaccactgctgtcatttcagcttctgg

SEQ ID NO: 9046 - DNA, 518 bp, Homo sapiens
  unsure (90): n=A,T,C or G
  unsure (104): n=A,T,C or G
  unsure (402): n=A,T,C or G
  unsure (462): n=A,T,C or G
ccatcttaagttaaaggccctttatcataaaatatatggttttaaattttactcaaattgaatttataatccctatgacttccctacatntacataacaaaagngtgtagtaaaattagcaaatactaaactatattgataatttatcattcttagtttgtggtttttagaaacagtacacgcacctaatatatgtcgattccttggcttattagttgcagtgtacaatgcaacaaaatacaaaatacatgcttggtgaacattcgttcatatctacaagacggcagctagagattaggtttcaatactgaccatttactatcctacaagcaattagcattacatcataatatgccatcaaggcaactttttttatactgaaaaaatcaaaataaaaaccgntatttgtaaacttttatacgaaatgtaactcttcaagtggaaataaaaaataaaatttgnctatttactattgaatacacataggatttcaattttcattataccgagaaaaaagc

SEQ ID NO: 9047 - DNA, 207 bp, Homo sapiens
ctgtattactactgtttctatatttatgattaattactagcagtacaactcccagaaggaaggagatggatccaacagcgatgtaagcaatccccaaaaatggattttttcctcccatccatgaaatagtgctcaagatcatccgttttcgtccatcaaaataatgtacagggtaattgtatgtgacattcaaagagtatcggccag

SEQ ID NO: 9048 - DNA, 597 bp, Homo sapiens
  unsure (568): n=A,T,C or G
ccttcattagaataaagtatatcttaactacattttgcaaagaaatgaagcaatggttgcacaaccagtcagggccaagttagtaacatacaactcagccatcagcccacctctccttcaaactaaactaatctaaatgtatttttcagaaaatttcctccatactccatgtatgtgttacatacatccaatcatatccatattttggatcatttttttctatattcatcagattattggttaaaatgcacagcaagtagaaatgatccatttcaaaattcttaatatctagcgttctctgtaaaacaaaagctgacaacagttttattgtactcctattaaatgtaggtgcatgttcattaggacatctgagctatttttaggaccttcagaaactggtgtgattcactttggccctctgagatagaaatgccatcttagtatttactgtgactacatacctcttttgttaaaacttgaccctgagttttgagtgctggaatataaactgtaaaatggaaaacactccaaaatacattagctaatattggtgtctctacaatactgngctttttctctccattaacataatgcacc

SEQ ID NO: 9049 - DNA, 596 bp, Homo sapiens
  unsure (16): n=A,T,C or G
  unsure (590): n=A,T,C or G
ctgcacatggattggntaacataatatatactgctatataatcttttaagggctaatatttgtagataatttaaaagcatgtcaatttcctctaagatttgattatttaacctgcacaaaggccaatcttcagttatcaatgacaagaaaactctagggctgccaaaataacttcattttagaccccagagttagtgttaggctggtaatgtttctaatttgggaataatgagactagaaagctaggagggccccctccaaatttctcccttgtattaggctgaagtagaacataacgtggcttaaagcataaacttaaagcatatgctttgagttttaaaaatgttaacctgtaattaattattagagtattatccatagtctactatgatagtcagttaatattctctaaatcagattatattcatttgaaaatgcatctgcatatttgcaaatgtgttattacacaagatcttacctatgtcaatttaaagaggttaaagatgcaggaagcccccactaaaatgtaaacacatttgtacggttttcagaatgtttggactcattctttcccattgacagagcagtangtttta

SEQ ID NO: 9050 - DNA, 506 bp, Homo sapiens
tttttatgcagtgcattcattgtaaactataaataacatttgtattaaaaagaaagctgggtaatacaaaaataggagagactctgaggagcaggcaatctgttgaggctcagtatatcttatttgctttgtagtctgctgtcattcctttcaaagagcacacagcacatgaggcatagtaatcatctgtcttgttaacctctctaatttagaaatctgttgttcgtaaaactggaccaattatcacaaactatcatttgcataattaaccgcaagtctgttacaaagcattttgttagtggtatcaacaaatgcaggaggatggacatttataaaaaatgggttttgttaagcttgccaactccttagatatcatggactatactgccatttcacgatttaattagatatttaatgcctcaagtaaaagactgatcaatggaagcaagcaaaactaaattattttctaggtgctgtaatatttcatttgataaggtaacaaaagg

SEQ ID NO: 9051 - DNA, 390 bp, Homo sapiens
ctgtgcccaggaaatggctaaattcatttcaaaaaacaaacacgtgagcctgtgcatcttcactgcccgcatctatgatgatcaaggaagatgtcaggaggggctgcgcaccctggccgaggctggggccaaaatttcaataatgacatacagtgaatttaagcactgctgggacacctttgtggaccaccagggatgtcccttccagccctgggatggactagatgagcacagccaagacctgagtgggaggctgcgggccattctccagaatcaggaaaactgaaggatgggcctcagtctctaaggaaggcagagacctgggttgagcctcagaataaaagatcttcttccaagaaatgcaaacaggctgttcaccaccatctccag

SEQ ID NO: 9052 - DNA, 225 bp, Homo sapiens
  unsure (49): n=A,T,C or G
  unsure (125): n=A,T,C or G
  unsure (155): n=A,T,C or G
  unsure (174): n=A,T,C or G
  unsure (190): n=A,T,C or G
  unsure (200): n=A,T,C or G
  unsure (203): n=A,T,C or G
  unsure (210): n=A,T,C or G
aaaatttcatcactaaaatgatctacaggtctatggaaaaatgtgtaancacataaaatacacaaacctatttttttaaaaatgagatacttaaaatttctttagcataccaacaaaaaatgaangtagcattgccattttactacagatgtgcngacattccaaagtccaccnattgttcgtatatatnggctcaacangtnatatttnagaatatactgctgg

SEQ ID NO: 9053 - DNA, 134 bp, Homo sapiens
  unsure (1): n=A,T,C or G
  unsure (3): n=A,T,C or G
  unsure (21): n=A,T,C or G
  unsure (118): n=A,T,C or G
  unsure (120): n=A,T,C or G
ngnccatggaaacatagtatnaatcatttgtgtatctaaatataaagacatataaataagtaaggaagtatagtcccgtggaaccaccatctgttactggcagaaactttgttatgcngnaaataactggattt

SEQ ID NO: 9054 - DNA, 256 bp, Homo sapiens
  unsure (150): n=A,T,C or G
  unsure (157): n=A,T,C or G
  unsure (166): n=A,T,C or G
  unsure (175): n=A,T,C or G
  unsure (197): n=A,T,C or G
  unsure (251): n=A,T,C or G
  unsure (256): n=A,T,C or G
ccaaggacttgacaaagacctgtgaatttatcgttcactccgctcctcagaaggggaagtttactcccagtcccgtggacttcacgattacacctgaaaccttacagaacgtcaaagagagagctttgcttcccaaatttctccttcgangacatcncaacttaancaaactgtntcatcacggcagccactaacgnggagagctggtggtggagagctcggaagccgccatcagaagcgtggagctgcanacctn

SEQ ID NO: 9055 - DNA, 269 bp, Homo sapiens
  unsure (137): n=A,T,C or G
  unsure (160): n=A,T,C or G
  unsure (176): n=A,T,C or G
aaatatgacctctgttccctgaagaaaaatcatatcaaagactctggctacgaatcccagcgggaactgtgaggcaaacatggtgaggaaccagggggcagcgtagaggctggggccgatctcgtgctcctccaggngattgtagaggtctctgtggtantcatgaagcaacctcnagagcttggtacatctggatcttgtaaaataatcatgtctggccgatactgtttccgcagccccatgtcaaacatcagaaacttgagcatttt

SEQ ID NO: 9056 - DNA, 363 bp, Homo sapiens
  unsure (18): n=A,T,C or G
  unsure (19): n=A,T,C or G
  unsure (159): n=A,T,C or G
  unsure (164): n=A,T,C or G
  unsure (168): n=A,T,C or G
  unsure (205): n=A,T,C or G
  unsure (345): n=A,T,C or G
  unsure (348): n=A,T,C or G
aaatatgctgcatagacnnctggaccatattttgtagccattaaattttcaaaagactgggtccactgtaatacttcctccaaagtaaggtttgaagggggcctcttagattcatctctgcacatcttacaaatccaacaattccgcctgctcattttncaaancttnaaataaacaatgatcatttttttctcatgttggtggnataatatgtggaaacattccattgacaaatatatcctgtcgagcagtccaccatgctaaatttgatctcctctttgttatgatccgtttgaaatcaggttctgaaattttgtgagacacccagcattttatttttcccanagnaaaagaattttactg

SEQ ID NO: 9057 - DNA, 196 bp, Homo sapiens
  unsure (2): n=A,T,C or G
  unsure (12): n=A,T,C or G
  unsure (104): n=A,T,C or G
  unsure (113): n=A,T,C or G
  unsure (167): n=A,T,C or G
  unsure (176): n=A,T,C or G
  unsure (182): n=A,T,C or G
  unsure (184): n=A,T,C or G
  unsure (186): n=A,T,C or G
cntggccgaggnaaatatcacaagtaggtgggtaagtgtcatctggcatcttctttctgtagccaggtaactcttagatcttattcatcagcctgctgaacagntcctttttnagagacatagataccatccaaaaatttcctgatatccttgcttttaactgttgnggctcgctnaaatcnanancccttgaatg

SEQ ID NO: 9058 - DNA, 102 bp, Homo sapiens
  unsure (18): n=A,T,C or G
  unsure (19): n=A,T,C or G
  unsure (20): n=A,T,C or G
aaaaaaggttctgaaatnnncatacaagcatgctggacaatcccacccttttcccctccccatttcccctttttttgttcaaaccatggtaagagttctgat

SEQ ID NO: 9059 - DNA, 593 bp, Homo sapiens
  unsure (25): n=A,T,C or G
  unsure (425): n=A,T,C or G
  unsure (475): n=A,T,C or G
  unsure (523): n=A,T,C or G
  unsure (558): n=A,T,C or G
  unsure (567): n=A,T,C or G
ttggcgtaatcatggtcatagctgnttcctgtgtgaaattgttatccgctcacaattccacacaacatacgagccggaagcataaagtgtaaagcctggggtgcctaatgagtgagctaactcacattaattgcgttgcgctcactgcccgctttccagtcgggaaacctgtcgtgccagctgcattaatgaatcggccaacgcgcggggagaggcggtttgcgtattgggcgctcttccgcttcctcgctcactgactcgctgcgctcggtcgttcggctgcggcgagcggtatcagctcactcaaaggcggtaatacggttatccacagaatcaggggataacgcaggaaagaacatgtgagcaaaaggccagcaaaaggccaggaaccgtaaaaaggccgcgttgctggcgtttttccatangctccgcccccctgacgagcatcacaaaaatcgacgctcaagtcagaggnggcgaaacccgacaggactataaagataccagcgtttccccctggaanctccctcgtgcgctctcctgttccgaccttgccgnttaccgganaccttgtccgctttctcctttgggaa

SEQ ID NO: 9060 - DNA, 249 bp, Homo sapiens
  unsure (17): n=A,T,C or G
aaattgacctcctcagntaactcagcagaacccagcatgtcagcagtaaattggtcaatatgagcaactggcttggttccaattgtcttacaaatgaattcaatgtcttctctttcaatatccttaatcaccatgatcttcattttattcagaaagtgtaatgcaagatcactaagagcatctcttagaatagatttctgtatgagaaggacattacatcctgtttttttaatttgcttcactaaattt

SEQ ID NO: 9061 - DNA, 373 bp, Homo sapiens; identical to SEQ ID NO: 4043

SEQ ID NO: 9062 - DNA, 209 bp, Homo sapiens
  unsure (21): n=A,T,C or G
  unsure (44): n=A,T,C or G
  unsure (54): n=A,T,C or G
  unsure (98): n=A,T,C or G
  unsure (160): n=A,T,C or G
  unsure (162): n=A,T,C or G
  unsure (175): n=A,T,C or G
  unsure (193): n=A,T,C or G
  unsure (197): n=A,T,C or G
ttttttttgactcaaaaagtnacatttattcaaagaaaaaaaangacaagatgnccatcccttggctcccttccctcccccctcctgctgctcctcancccccagagattgagccctggctggggctgggtggcaggacagcccctcacatgaggtcagnancattgagggggcntttcctcaatggaggtgnttgnataaggtctcaa

SEQ ID NO: 9063 - DNA, 117 bp, Homo sapiens
cctactgctgagttcttatttatttaattgcttattgtcagtctcttccccacagaatggaagttccatcaaagtagagattttgttctctcttgttcaggatctgagtctccaagg

SEQ ID NO: 9064 - DNA, 434 bp, Homo sapiens
  unsure (68): n=A,T,C or G
  unsure (139): n=A,T,C or G
  unsure (157): n=A,T,C or G
  unsure (168): n=A,T,C or G
  unsure (192): n=A,T,C or G
  unsure (241): n=A,T,C or G
  unsure (317): n=A,T,C or G
  unsure (356): n=A,T,C or G
  unsure (375): n=A,T,C or G
  unsure (383): n=A,T,C or G
aaacataaaagatattcagagttttgggtcaactgcatctttctggagagtttagtttcttgttaagncaatttgtgtattttcattgagcatacatccttaacaaggtttcatacatgctggcactttgagggacagncaagggacattctgaaanaactcccaatngactggggatcaggagattgaatntcaaattatattttcgcccattaatctgactctgtaaacttgaaaaagncatttcctttctctgggctatgtggaagttcctttttttataaatgacaaatagccttatcatggaatcatagaanattaactttagaggtggtttagagcccatcctcattttncaggcccaaagaaatgaantgagtttngtcagtcaatacgatagctcctcctggggaaaaaaaaacaaaaaagaagtg

SEQ ID NO: 9065 - DNA, 354 bp, Homo sapiens
  unsure (154): n=A,T,C or G
ccaccctcactgtgcaccccgtggatgttctgcgcacccgctttgcagctcagggtgagcccaaggtacggagatacaagggcctcatggactgtgccaagcaggtgctgcaaaaggaaggcgccctgggcttcttcaagggcctgtcccccanttgctgaaggctgccctctccacaggcttcatgttcttctcgtatgaattcttctgtaatgtcttccactgcatgaacaggacagccagccagcgctgagcgcaggaaggaccccaggtcttccctggaggcagcctcctgaaggaaggaagattcagtctccactgagaggtgccgtctggcccttccctgcaggccag

SEQ ID NO: 9066 - DNA, 136 bp, Homo sapiens
  unsure (12): n=A,T,C or G
  unsure (17): n=A,T,C or G
  unsure (40): n=A,T,C or G
  unsure (53): n=A,T,C or G
  unsure (55): n=A,T,C or G
  unsure (56): n=A,T,C or G
  unsure (69): n=A,T,C or G
  unsure (81): n=A,T,C or G
  unsure (83): n=A,T,C or G
  unsure (98): n=A,T,C or G
  unsure (109): n=A,T,C or G
  unsure (118): n=A,T,C or G
  unsure (119): n=A,T,C or G
tggacctgaccnccgtntgatggacctgaccgctgatganggacctgatcgcngnntgatggacctgancgactgtatgangngacctgacccccgtntgagggacctnacccgttgnntgatggacctgaccgcc

SEQ ID NO: 9067 - DNA, 472 bp, Homo sapiens
  unsure (135): n=A,T,C or G
  unsure (144): n=A,T,C or G
  unsure (152): n=A,T,C or G
  unsure (171): n=A,T,C or G
  unsure (242): n=A,T,C or G
  unsure (279): n=A,T,C or G
  unsure (302): n=A,T,C or G
  unsure (329): n=A,T,C or G
  unsure (335): n=A,T,C or G
  unsure (405): n=A,T,C or G
  unsure (418): n=A,T,C or G
  unsure (469): n=A,T,C or G
aaaaggtaactttttaccaattttttgatcttcattagctggagtcaatgagtccaaggctggaatacatcgaaggagggcacaaccccctcccaaaacaatgccttcttcaacagcagctcttgtagcattaanggcatctgnaactctgnctttcttttcattcacttncaacatcacttgtcccaccaaccttcagcacagccactccatctgaaagttttgcaagccgttcattcagnttttccttttcatattcactagttgtgacatctaacngctcaatgatttcttgaatacgnttttcaatttgagccttgtcacctttncctttnaagagcatggcatcgtctttggtcacaatgacctctccaacttttcctaagtcatgaggctgaacgtctncaagattcagggncaatccctcttctccaaacactgcaccaccagtagcaatagccatatcttntaa

SEQ ID NO: 9068 - DNA, 112 bp, Homo sapiens
  unsure (49): n=A,T,C or G
  unsure (53): n=A,T,C or G
  unsure (54): n=A,T,C or G
  unsure (86): n=A,T,C or G
  unsure (105): n=A,T,C or G
ccgaggtaaaaaagagcaacagtggggaagcggctcccctcccccaagncatnntggctggcacactgtctgagcatcaccctggntttcaaagcgcgtcagctncaagacg

SEQ ID NO: 9069 - DNA, 306 bp, Homo sapiens
  unsure (9): n=A,T,C or G
  unsure (115): n=A,T,C or G
  unsure (173): n=A,T,C or G
  unsure (191): n=A,T,C or G
  unsure (195): n=A,T,C or G
  unsure (246): n=A,T,C or G
  unsure (273): n=A,T,C or G
  unsure (285): n=A,T,C or G
  unsure (299): n=A,T,C or G
tgatcctgnggatgggaaattttttgatcatgcggcacatcttgggggagctctttttggaatatggtatgttacttacggtcatgaactgatttggaagaacagggagccgctngtgaaaatctggcatgaaataaggactaatggccccaaaaaaggagggggttctaagnaaaactgggattggacantagnggtgcatctggtccttgccgcctgagagccccaggagacatcggctagagngaccatggctatgctcccgtctggaangatgccagcatntggcctcccactgnttttcag

SEQ ID NO: 9070 - DNA, 231 bp, Homo sapiens
  unsure (24): n=A,T,C or G
  unsure (50): n=A,T,C or G
  unsure (84): n=A,T,C or G
  unsure (111): n=A,T,C or G
  unsure (131): n=A,T,C or G
  unsure (135): n=A,T,C or G
  unsure (144): n=A,T,C or G
  unsure (163): n=A,T,C or G
  unsure (222): n=A,T,C or G
  unsure (225): n=A,T,C or G
ctgccaaccctgtctacggcaggnatgaccagtataagactccaatgganaacattgggctacaggactcactgctgtcacganttgacttgctcttcatcatgctggatnagatggatcctgagcaggancggnagatctcanaccatgtccttcggatgcnccgctacagagcacctggggagcaggatggcgatgctatgcccttgggtagtgctgtgnatntcctgg

SEQ ID NO: 9071 - DNA, 299 bp, Homo sapiens
  unsure (1): n=A,T,C or G
  unsure (3): n=A,T,C or G
  unsure (4): n=A,T,C or G
  unsure (11): n=A,T,C or G
  unsure (31): n=A,T,C or G
  unsure (32): n=A,T,C or G
  unsure (39): n=A,T,C or G
  unsure (58): n=A,T,C or G
  unsure (121): n=A,T,C or G
  unsure (149): n=A,T,C or G
  unsure (180): n=A,T,C or G
  unsure (181): n=A,T,C or G
  unsure (193): n=A,T,C or G
  unsure (204): n=A,T,C or G
  unsure (223): n=A,T,C or G
  unsure (224): n=A,T,C or G
  unsure (235): n=A,T,C or G
  unsure (242): n=A,T,C or G
  unsure (269): n=A,T,C or G
  unsure (275): n=A,T,C or G
  unsure (294): n=A,T,C or G
  unsure (296): n=A,T,C or G
ncnnggccgangtcctcaatcacaactttgnnagcagcngaaccggagggagccgcantgtacgccacaccactccttttagctctgtctacgttatctgggaaagggaagaaagcatcanagctgatagaaacttcagacaggttctnaacccattccttcttctctgcctcagtgagnnactgagggactncctcaaacagngccttccactttatcaaannttgatcctcgncaatggntccagtcacatattgatcgatggcatnggaganttctgctctcttcactccngnttt

SEQ ID NO: 9072 - DNA, 287 bp, Homo sapiens
  unsure (10): n=A,T,C or G
  unsure (31): n=A,T,C or G
  unsure (51): n=A,T,C or G
  unsure (71): n=A,T,C or G
  unsure (75): n=A,T,C or G
  unsure (104): n=A,T,C or G
  unsure (144): n=A,T,C or G
  unsure (163): n=A,T,C or G
  unsure (186): n=A,T,C or G
  unsure (187): n=A,T,C or G
  unsure (208): n=A,T,C or G
  unsure (232): n=A,T,C or G
  unsure (249): n=A,T,C or G
  unsure (268): n=A,T,C or G
gcttactggntcccgaaaatagacaccttcntgagtcagacccctatgggnaccggcctttctcaaatatnagtnagcaccctcaatcccactgctaaacgacnttttggtcctcgctctgccactatgactccaagtattttntcccactggaacaacacantgtttgtaggagccactgattcnncgtgccatggcgcaatgatgntggaacttgctcgtgcttagacangaaactcctttccttanagactgtttcagactccangccagatttgcactccagc

SEQ ID NO: 9073 - DNA, 402 bp, Homo sapiens
  unsure (106): n=A,T,C or G
  unsure (149): n=A,T,C or G
  unsure (169): n=A,T,C or G
  unsure (170): n=A,T,C or G
  unsure (298): n=A,T,C or G
  unsure (346): n=A,T,C or G
  unsure (392): n=A,T,C or G
ccaccacacccaattccttgctggtatcatggcagccgccacgtgccaggattaccggctacatcatcaagtatgagaagcctgggtctcctcccagagaagtggnccctcggccccgccctggtgtcacagaggctactattactggnctggaaccgggaaccgaatnnacaatttatgtcatttgccctgaagaataatcagaagagcgagccccttgattggaaggaaaaagacagacgagcttccccaactggtaacccttccacaccccaatttttcatggaccacagatctnggatgttccttccacagttcaaaagacccctttcgtcacccaccctgngtatgacacttggaaatggtattcagcttccttggcactttttggncagcatccca

SEQ ID NO: 9074 - DNA, 554 bp, Homo sapiens
  unsure (126): n=A,T,C or G
  unsure (216): n=A,T,C or G
  unsure (231): n=A,T,C or G
  unsure (297): n=A,T,C or G
  unsure (339): n=A,T,C or G
  unsure (342): n=A,T,C or G
  unsure (393): n=A,T,C or G
  unsure (401): n=A,T,C or G
  unsure (419): n=A,T,C or G
  unsure (434): n=A,T,C or G
  unsure (462): n=A,T,C or G
  unsure (496): n=A,T,C or G
  unsure (520): n=A,T,C or G
  unsure (521): n=A,T,C or G
  unsure (549): n=A,T,C or G
ccaaacccccgtctctacaaaaaaatacaaaaatcagctaggcgtggtggtgcgcgcctgtactcccagctacttaggaggctgaggtgggagagtcactggagcctgggaggtcgaggctgcagngcaagattgagaattgcaggattgcactgcaatccagcctgtgctacagagtgagatcctgtctcgaaaaaaaaaataaaaaaataaaangggcctatcaatgcnacgttcctgcaaggcattgataatataaatgcaaaagccaccgcaaccaaaaaggctataatgctngcctgaatctagtacataagcaggataatgacaatcactttntgnttataaatttgtagatgtcttattatttcagtcagcatgaggactgcattnatatttgngggtggcagctctcaaanttatttatccatagnccagatttgttttgttgcatttgctctnaaaatgcattgttgtatactccatcacagaaggngtcaaaatactcctgctgcctttnnaaaatgttgcaaaaccctaaacctgtanttttc

SEQ ID NO: 9075 - DNA, 240 bp, Homo sapiens
  unsure (95): n=A,T,C or G
  unsure (142): n=A,T,C or G
  unsure (159): n=A,T,C or G
  unsure (160): n=A,T,C or G
  unsure (180): n=A,T,C or G
  unsure (182): n=A,T,C or G
  unsure (230): n=A,T,C or G
cctcgccagcctcagtcaaatgtaacgttcctaggccaagccacgaattgcccaactgggtggtccggctgccctgctatctcacttgtttgtgngcttattgtcaactctacctatgaggagtgagctcctaaaagcaganatttgggcagcgcaggnngctcacacctgtaatcccancnctttgggaggatgaggcggggcggatcacctgagctcaggagttcaanaccagcctgg

SEQ ID NO: 9076 - DNA, 194 bp, Homo sapiens
  unsure (15): n=A,T,C or G
  unsure (70): n=A,T,C or G
  unsure (75): n=A,T,C or G
  unsure (86): n=A,T,C or G
  unsure (102): n=A,T,C or G
  unsure (132): n=A,T,C or G
  unsure (161): n=A,T,C or G
  unsure (162): n=A,T,C or G
  unsure (167): n=A,T,C or G
  unsure (186): n=A,T,C or G
tttggggctcccagnggttccctaaatttgagggatggaggaagacttcccttgccccaccccaagcctnccgancctggtggatnggtccctgtccccacncaacctggtggcacgggtggggcttcccgngctaataacccccctttttccttcttgtnngaccngctcccctcaaaagcttcncgccaaca

SEQ ID NO: 9077 - DNA, 80 bp, Homo sapiens
  unsure (1): n=A,T,C or G
  unsure (24): n=A,T,C or G
  unsure (25): n=A,T,C or G
  unsure (57): n=A,T,C or G
  unsure (61): n=A,T,C or G
  unsure (66): n=A,T,C or G
  unsure (80): n=A,T,C or G
ntatacagcacttatatcttttannccacaaccgatattatttaaatgatatgacancatntaatncaaccatttctccn

SEQ ID NO: 9078 - DNA, 345 bp, Homo sapiens
  unsure (308): n=A,T,C or G
ctgctgcacatgatgcaggaatcactatcttctctgttggtgtggcttgggcacctctggatgacctgaaagatatggcttctaaaccgaaggagtctcatgctttcttcacaagagagttcacaggattagaaccaattgtttctgatgtcatcagaggcatttgtagagatttcttagaatcccagcaataatggtaacattttgacaactgaaagaataagtacaaggggatccagtgtgtaaattgtattctcataatactgaaatgctttagcatactagaatcagatacaaaactattaagnatgtcaacagccatttaggcaaataagcactctcttt

SEQ ID NO: 9079 - DNA, 167 bp, Homo sapiens
  unsure (18): n=A,T,C or G
  unsure (21): n=A,T,C or G
  unsure (129): n=A,T,C or G
  unsure (145): n=A,T,C or G
  unsure (147): n=A,T,C or G
  unsure (156): n=A,T,C or G
  unsure (160): n=A,T,C or G
aaaactcttataataagngtnctaatagtaatatgaaacctgcttactgctcctttgtctgatacctgcatttctccaaatgataaaaaactttgtcacgaccttagttcaccaaaatgctttagcagnaagcatactatctaancncactatcantctnttgcaca

SEQ ID NO: 9080 - DNA, 244 bp, Homo sapiens
  unsure (3): n=A,T,C or G
  unsure (134): n=A,T,C or G
  unsure (149): n=A,T,C or G
ggnatctggcaggtgctaaataaatgtttcctggatcgaaatctacagtctcaaggagtcaaggctacaattcttaagttgcttcagatgactggttctatctatttatcaatacatccatcgatccactcatncctcatccatgcatnctcctacccttcctcttccccgtcaaacattcatccatccaattggtggcttggggaaagggacaaaaaggggaaaaaaaaaaaaaaaaaaggaa

SEQ ID NO: 9081 - DNA, 296 bp, Homo sapiens
  unsure (197): n=A,T,C or G
  unsure (243): n=A,T,C or G
cctctgagcagaacgaggtaaatcttcactgttagctacaaagagcactgcatgaaagtgtgtgcaagatgactccatgaggttttctttttaagtttatgtatatttacagaaaagtgaaatgtgttggaagaataaacaccccttcttgtggacacttttagagaggagaattttgggctgggaaaaaaggagancctttttatttttttgctgctctctactgtttgtcttttctgtagntaatattaatattaattgtattaatattctgactttaatattagaaacttttt

SEQ ID NO: 9082 - DNA, 149 bp, Homo sapiens
  unsure (120): n=A,T,C or G
aaagaaatatataactatttattaaccactgttcagtatttacaataaagtaaacaatatacagttggataacattttgattactacaaagttgttcttcctggcttttgctgaaccagnaaagcaaactcaagattgagcctccatgt

SEQ ID NO: 9083 - DNA, 338 bp, Homo sapiens
  unsure (34): n=A,T,C or G
  unsure (256): n=A,T,C or G
ttcgaatcaccctaacaagccgcaacggaaaatncttggaaaaggtgtgtgctgacttgataagaggcgcaaaagaaaagaatctcaaagtgaaaggaccagttcgaatgcctaccaagactttgagaatcactacaagaaaaactccttgtggtgaaggttctaagacgtgggatcgtttccagatgagaattcacaagcgactcattgacttgcacagtccttctgagattgttaagcagattacttccatcantattgagccaggagttgaggtggaagtcaccattgcagatgcttaagtcaactattttaataaattgatgaccagttgttaa

SEQ ID NO: 9084 - DNA, 170 bp, Homo sapiens
  unsure (40): n=A,T,C or G
  unsure (43): n=A,T,C or G
ccatttatgaagatgaagaatacagtcagctttgtgaaanagnattgcaagcaagccccgtgggcaaatttgtattgagtccatctgtaatttgctcagtgatggcagacaagatggctgtctggttttgagacacactttaattttatgttaacttgttaaatcttttt

SEQ ID NO: 9085 - DNA, 600 bp, Homo sapiens
  unsure (11): n=A,T,C or G
  unsure (546): n=A,T,C or G
  unsure (549): n=A,T,C or G
  unsure (562): n=A,T,C or G
  unsure (563): n=A,T,C or G
  unsure (595): n=A,T,C or G
ctgttagagtntttagagtcctgagataacaaggaatccaggcatcctttagacagtcttctgttgtcctttcttcccaatcagagatttgtggatgtgtggaatgacaccaccaccagcaattgtagccttgatgagagaatccaattcttcatctccacgaatagcaagttgcaagtgacgaggggtaatacgctttacctttaagtcttttgatgcatttcctgccagttcaagtacctctgcggtgaggtactccaggatggctgcgctgtacacagcggcagtcgcgcccacacgtccatgactggtcgtcctagattttaggtgtcgatgaatacggcccactgggaactgcaagccggctctctgcgagcgggaaaccgcctttgtcttggcctttccggagtcctttccagccttaccgccagccatttcgaattccgctgaagctcaagcaagcaaggcagagaaaaggctaatcggacccaccggtgagatcccaccacctactcctttcgacctgcccgggcggggcgctcaaanggncgaattcttgcannatatccatcacacctgggcggggcgcttcgangcatg

SEQ ID NO: 9086 - DNA, 373 bp, Homo sapiens
  unsure (44): n=A,T,C or G
ctgtagcttttgtgggacttccactgctcaggcgtcaggctcanatagctgctggccgcgtacttgttgttgctttgtttggagggtgtggtggtctccactcccgccttgacggggctgctatctgccttccaggccactgtcacggctcccgggtagaagtcacttatgagacacaccagtgtggccttgttggcttgaagctcctcagaggagggcgggaacagagtgaccgagggggcagccttgggctgacctaggacggccagtttggtccctccgccgaagacgacatggtcattattacgatcccacacttgacagtaatagtcggcctcatcgccggcttcgaccctgttgatggtcagggtgg

SEQ ID NO: 9087 - DNA, 474 bp, Homo sapiens
  unsure (445): n=A,T,C or G
  unsure (457): n=A,T,C or G
tctgaattttattagagctcacacaccatatattaacatatacaactgtgaaccagctaatccctctgagaaaaactccccatctacccaatactgttacagcatacaatctctgttcttgggcattttgtcagtgatgctgatctttgccttcttccaggaacttgtaatagctggcatcgttgagaatgaatggaaaagaacgtgctccagacccaaatctaacatagttctcctgtcagcagaagaaaaaaagaacagactattgaaataaaagaagaagtggttgggctaactgaaacatcttcccaaccaaagaatgaagaagacattgaaattattccaatccaagaagaggaagaagaaagaaacagagacgaactttccagaacctccccaagatcaggaatcctcaccaatagaaaatgacagctctccttaaggngatttcttctgntttctggttcctttttt

SEQ ID NO: 9088 - DNA, 383 bp, Homo sapiens
  unsure (2): n=A,T,C or G
  unsure (29): n=A,T,C or G
  unsure (146): n=A,T,C or G
  unsure (239): n=A,T,C or G
  unsure (247): n=A,T,C or G
  unsure (286): n=A,T,C or G
  unsure (326): n=A,T,C or G
  unsure (329): n=A,T,C or G
  unsure (376): n=A,T,C or G
  unsure (379): n=A,T,C or G
tngcaactaaagacacaagcctgaagaangaactattgaggatacctccaccgtctcccaaaacaagaaagaatcacattgatttaagataaaattttgccataagtcactaaattaagagtttttcgaaagagaaggcgcagtantcatcgtgagtgtttcactgaaagacagagctattttatttatttaatttgctccagccgttggcaaccagccactacaaatgggcctcttgngatcattnaaccggcagtatttattaaatttgtccttcagatgctgncggtattgttctctattgctgtagaaagactggttattanccntaaatgactgtatttcatcttgtgagataaagatttcctgatctganccncatt

SEQ ID NO: 9089 - DNA, 597 bp, Homo sapiens
  unsure (9): n=A,T,C or G
  unsure (10): n=A,T,C or G
  unsure (47): n=A,T,C or G
  unsure (495): n=A,T,C or G
  unsure (524): n=A,T,C or G
  unsure (544): n=A,T,C or G
  unsure (569): n=A,T,C or G
  unsure (584): n=A,T,C or G
aaataaganntttctttaatcaggtatccctttggactgggagagcngtttatatcatagctttgcagcataatctttttactctcaggctcttcaagcatttttatcttctttgaaacttctatctaaacaaaaatagtattaaaaaagataacagaaggggttagattctgccaatgaactgtggacatcagtatctcattcttctatttgcctccttattctagtttgaaaaagctttggaacacattattacctatcattattacatatttcttgtagctttagtgttactcccccgactggaaatagaagttgctctttaataaggcccagggtgcttagggagcaatgcgagatttttcttacatctcttgggccaaccctatacaactaattctgggaaagggattgttataatacactgtccttgaaaagtttctttcagtccatttggagaaatgttgggataaagataacttagtgcttacaagntgctctattattagtaggtataataaccntaattattattaaacctaanagttatctattactttatcaccctntctccaatttatggntttctcctctttt

SEQ ID NO: 9090 - DNA, 305 bp, Homo sapiens
ctgtcttttggaggacgtacgtaataaggttttaatttagtaaaccaatcctatgcatggtttcagcactagccaaacctcaccaactcctagttctagaaaaacaggcacttggcagccttgtgatgtcatacagagaagtcacagggcagtacctgagggtctgtaggttgcacactttggtaccagataactttttttttctttataagaaagcctgagtactccacactgcacaataactcctcccagggttttaactttgttttattttcaaaaccaggtccaatgagctttctgaacag

SEQ ID NO: 9091 - DNA, 664 bp, Homo sapiens
  unsure (10): n=A,T,C or G
  unsure (11): n=A,T,C or G
  unsure (29): n=A,T,C or G
  unsure (48): n=A,T,C or G
  unsure (54): n=A,T,C or G
  unsure (149): n=A,T,C or G
  unsure (219): n=A,T,C or G
  unsure (236): n=A,T,C or G
  unsure (256): n=A,T,C or G
  unsure (344): n=A,T,C or G
  unsure (462): n=A,T,C or G
  unsure (500): n=A,T,C or G
  unsure (521): n=A,T,C or G
  unsure (636): n=A,T,C or G
  unsure (638): n=A,T,C or G
  unsure (640): n=A,T,C or G
  unsure (651): n=A,T,C or G
  unsure (658): n=A,T,C or G
ctgaggcatnnttcctgggccagagtcgngtccaccaagggacagtanccaganctcctcttcctttaccaggcaaggtgcatcccctcagccctcctggcccttcagtcttggtgccacctgggcacaggggcaagcttggtggctgngagtccattcatctatcagagctggaacctcatccctgcacagatgaggaaaccaaggcatggagcagtncccagagtcgaatctanatctcatctgtcatccgggncttatcctttgctctgtttttctcttcaggctctggaaaatcagatctgtgacttaatcttcctctccctggccctcacccacttagnttctttttcattcctgctccctgccttaactcctcctcccactgcccctgatcccaggcccaggcttttacaacctggtgctcagcttccccatcagttgaaaaggggtggctagagnaactaacctcagcaggccgtccagccttgatagtctgnggatttcggatccttctcaangaagcttcatgtctaatgggagactataattataactcctgttctgcatagagcatttgcatcaaaggctttccatacccctccctcccctggtcctcataagaatccttgaagnangntcctattcctnattggcnaccatg

SEQ ID NO: 9092 - DNA, 451 bp, Homo sapiens
  unsure (138): n=A,T,C or G
  unsure (141): n=A,T,C or G
  unsure (159): n=A,T,C or G
  unsure (162): n=A,T,C or G
cctacagacttatttcttcttggacacacccacggtgcggccacggcggccagtggtcttggtgtgctggcctcggacacgaaggccccagaagtgacgcagccctctatgggcccgaatcttcttcagtcgctccangtnttcacggagcttgttgtncanaccattggctaggacctggctgtattttccatcctttacatccttctgtctgttcaagaaccagtctgggatcttgtactggcgtggattctgcataatggtgatcacacgttccacctcatcctcagtgagttctcccgccctcttggtgaggtcaatgtctgctttcctcaacaccacatgagcatatcttcggcccacacccttaatggcagtgatggcaaaggctattttccgcgcccatcgatgttggtgttgagtactcgcaaaatatgctggaacttttcag

SEQ ID NO: 9093 - DNA, 409 bp, Homo sapiens
aaagtcatgtttattgaagtatgattttacattcagcaaaattcatcctgttaaggtttgacaaacgcacagtcataccataatcaagatgcagaactgtagaatcacactaacaattccttcctgcccttgtaatcaacccctttttgatcccaaggaactcactgacctgtttttctgtcaaaagtatcaaatttcatcactaaaatgatctacagtactatggaaaaatgtgtaagcacataaaatacacaaacctatttttttaaaaatgagatacttaaaatttctttagcataccaacaaaaaatgaaggtagcattgcattttactacagatgtgcggacattcaaagtccaccattgtcgtatatatggctcaacagtaatatttaagaatatactgctgg

SEQ ID NO: 9094 - DNA, 215 bp, Homo sapiens
  unsure (13): n=A,T,C or G
gttgtctaccttnttttcttcctcatttccttcttttattcctccccaccccaaccccttaaaaaaaaggtcagaaggacaaagctggtttgtttgggaaatggactgatcgaaagaaaacttgccaaagtggaaaggtggcttttagcattctgtgtttccaaataatgaatttgaacaccaggttgggttaattaaagcttttggtataattt

SEQ ID NO: 9095 - DNA, 408 bp, Homo sapiens
  unsure (245): n=A,T,C or G
  unsure (373): n=A,T,C or G
  unsure (377): n=A,T,C or G
ctgcaatgtggccttgattttctcatcagtaaaatgggaaagctggatttggaggctggaagagatctcacagcttgaccaccctagtaggagggagggagaccagacggaggccaggcaaccgacccaggcagcatctggctcagacgcagacacatcttcatgttgagggacctattcttacacagcaaaacccagagaagtcgactgctcagcctgagcctgtcatccctatatagactcancttttaggagaagagggagagttgaggagatagcatcgctctctgtatcagtgtctgatgatctggagtctgcccctggggtcactcagtcactcaacaaacatttgttgagctcttaacgtctatangggngtgagctctgcccttcgaggctgtatgtctc

SEQ ID NO: 9096 - DNA, 373 bp, Homo sapiens
caggacacagcatggacatgagggtccccgctcagctcctggggctcctgctgctctggctcccaggtgccaaatgtgacatccagatgacccaatctccttccaccctgtctgcatctgtcggagatacagttacaataagttgtcgggcctctcagaatatagatcggtggttggcctggcatcaacagaaaccaggcaaagcccctaatgtcctaatttatgcgacttccagtttagaagaaggggtctcattaagatttactggcagtggatctgggacacaattcaatttaaccatcaccagtctgcagcctgacgattcagcaacttattattgtcaacattattctgcatctcttcgcagttttgg

SEQ ID NO: 9097 - DNA, 482 bp, Homo sapiens
  unsure (304): n=A,T,C or G
  unsure (362): n=A,T,C or G
  unsure (384): n=A,T,C or G
  unsure (396): n=A,T,C or G
  unsure (439): n=A,T,C or G
  unsure (443): n=A,T,C or G
cctttggggaactgggatgcttatttcctctgccttccttggctgcccacatggatgcctaagtgtcttccctccgggatagagtgtcctccgtgcacatgctgaagagttgtctttcttgacgtaggccagaggcattgatgtgcagcaggtttctttagtcatcaactatgaccttcccaccaacagggaaaactatatccacaggtaagcgtagatctggaacactcccctaccccttcacacctggccctccctgggcttaaagctcctgatattcctcatccccttccttgttttccanaatcggtcgaggtggacggtttggccgtaaaggtgtggctattaacatggtgacagangaagacaagaggactcttcganacattgagaccntctacaaccctccattgaggaaatgcccctccatgttgctganctcntctgagggggtgtcctgccaccccacccccagccagggg

SEQ ID NO: 9098 - DNA, 117 bp, Homo sapiens
  unsure (26): n=A,T,C or G
  unsure (28): n=A,T,C or G
  unsure (30): n=A,T,C or G
  unsure (85): n=A,T,C or G
ccttggagactcagatcctgaacaanananaacaaaatctctactttgatggaacttccattctgtggggaagagactgacaatnagcaattaaataaataagaactcagcagtagg

SEQ ID NO: 9099 - DNA, 619 bp, Homo sapiens
  unsure (375): n=A,T,C or G
  unsure (507): n=A,T,C or G
  unsure (508): n=A,T,C or G
  unsure (558): n=A,T,C or G
  unsure (563): n=A,T,C or G
aaaagctcagctcgaacctcacggattttcctgacaatctgcttctctcaatggccttaatttaagtgagggttgtcagtcttactgggtctcgttttttgtcttaaataataactatttatgggtatcaagtgtctcctcaatttggctatgatccttcacggcagaaatactgtcttatcttgtgatcatggagtcacaagatttcatggctaggaatattcgtcaaattaatcctagattgaggatcaggtagtatgtggtctgattctaactcaacaacttgcagaaactcacttcttttttctttttttttccccaggaggagctatcgtattaactgacgaaactcacttcatttctttggacctgcanaatgaggatgggctctaaaccacctctaaaggtaatattctatgattccatgataaggctatttgtcatttataaaaaaaggaacttccacatagcccagagaaaggaaatgactttttcaagtttacaganncaattaatggacgaaatataattgtgaaattcaatctcctgatccccagnctatnggggagttctttcaaaatggccccttgactgtccctcaaagtgccagcatgcagga

SEQ ID NO: 9100 - DNA, 431 bp, Homo sapiens
  unsure (178): n=A,T,C or G
  unsure (344): n=A,T,C or G
aaaaagtaagccactgcctcttacctaaaggtcagcatgggcttcatcatacagcggtcaggtccatcatacagcggtcaggtccatcatacagcggtcaggtccatcatatggcggtcaggtccatcatacagcggtcaggtccatcatacggcggtcaggtccatcatacagcggncaggtccatcatacggcgctcaggtccatcatacagcggtcaggtccatcatacggtggtcaggtccatcatacggcggtcaggtccatcatacggcggtcaggtccatcatacggcgctcaggtctgtaactcttgacaggaaggtgcactagcagaatggcganatgcactgagggtaaccagatgatctcatgggacttacccagtgttagcaccaaagtcccatgaactgaggtgctaaaacataaagg

SEQ ID NO: 9101 - DNA, 533 bp, Homo sapiens
  unsure (268): n=A,T,C or G
  unsure (287): n=A,T,C or G
  unsure (308): n=A,T,C or G
  unsure (354): n=A,T,C or G
  unsure (410): n=A,T,C or G
  unsure (423): n=A,T,C or G
  unsure (457): n=A,T,C or G
  unsure (465): n=A,T,C or G
  unsure (509): n=A,T,C or G
  unsure (510): n=A,T,C or G
  unsure (530): n=A,T,C or G
aaatcttactatcaactattcttaacaggctaaaggttggtcttcaggttgtggcagtcaaggctccagggtttggtgacaatagaaagaaccagcttaaagatatggctattgctactggtggtgcagtgtttggagaagagggattgaccctgaatcttgaagacgttcagcctcatgacttaggaaaagttggagaggtcattgtgaccaaagacgatgccatgctcttaaaaggaaaaggtgacaaggctcaaattgaaaaacntattcaagaaatcattgancagttagatgtcacaactagngaatatgaaaaggaaaaactgaatgaacggcttgcaaaactttcanatggagtggcctgtgctgaaggttggtgggacaagtcgatgtttgaagtgaatganaagaaagacaganttacagatgcccttaatgctacaagagctgctgntgaagaangcattgttttgggagggggttgtgccctccttccatgtattccnnccttggactcattgactccncct

SEQ ID NO: 9102 - DNA, 519 bp, Homo sapiens
  unsure (1): n=A,T,C or G
  unsure (26): n=A,T,C or G
  unsure (418): n=A,T,C or G
  unsure (431): n=A,T,C or G
  unsure (467): n=A,T,C or G
  unsure (482): n=A,T,C or G
  unsure (495): n=A,T,C or G
  unsure (512): n=A,T,C or G
  unsure (519): n=A,T,C or G
ngggtctgggtacttcattattgganggagcaggtatgtggctggcattgaagggttttttggacccctgaagtactatcgccttcgcagtctgcaccccgcccagatttttaatcccctccttgagaagcaacttgctgaacaaatcaagttatattatgaaaggtgtgctgaggttcaaggaatagtatctgtgtatgcatctgcagcaaagcacgggggcgagagacaagaagcatgccacctccacaactcctacctggacctccagcgcaggtatgggagaccctcgatgtgcagagccttcccctgggagaaggagctgaaagacaaacaccccagcttgttccaggcattgctggagatggatctgctgaccgtgccaaggaaccaaaatgaatctgtatcagaaatcggngggaagatatttngagaaggctgtaaagagactctctagcattgatggncttccccaaaattanctctatcgccccnttctgacggattcccancctcggn

SEQ ID NO: 9103 - DNA, 381 bp, Homo sapiens
  unsure (1): n=A,T,C or G
  unsure (2): n=A,T,C or G
  unsure (240): n=A,T,C or G
  unsure (344): n=A,T,C or G
  unsure (373): n=A,T,C or G
nncatggcccaccacctgcccttcagtgttcaagcaggggacatgcaccctttagtaacctggaggggacccatcacatgacaaccaccccaatgaccatcatcaggaagccgctgcctgactgagatatgcccccaggaggacaagggagagtggatgctggaaagacagggcaggggaccatcaccagggaaagacttcattcttcggaggacattgaacctggggctgggtctgtancggagccgctgtttcttctcctgtatccaactgttctaactcttgggctttctccattttcagctctttcttttcctggccttctcattgctggttccttcaancctcctctctattcttccgacaatatatncttttttt

SEQ ID NO: 9104 - DNA, 459 bp, Homo sapiens
  unsure (1): n=A,T,C or G
  unsure (23): n=A,T,C or G
  unsure (376): n=A,T,C or G
  unsure (411): n=A,T,C or G
  unsure (413): n=A,T,C or G
  unsure (416): n=A,T,C or G
  unsure (456): n=A,T,C or G
naaaattgatcacaacgaggganaacaaaataaaattagggggcaaagggtaggagtatggggggaggggagagcaaacctatcgaatatatcttagaattttgctcagaaatcactgctgcctctcaagtgttgcattgtccctgcctaaaccaagaaggctaaacaaagcccctcctgtttgaattcttaaggtaagaaatttctaagctaagaaaacactattgcctaaaaccaatgatagtggagctcatttacaaataggcatgcctcacacacacagtccaaaggcaagacactggctttgaaattaggctcatgatgtgattcctattatatgtacctgatttttttaggccccaggtatgtggaccanagttaatgtcatgactcttcaaagatatgatgaananttnccctagaaatctagagatgcatgtttatttaattccatanttt

SEQ ID NO: 9105 - DNA, 140 bp, Homo sapiens
  unsure (1): n=A,T,C or G
  unsure (5): n=A,T,C or G
ncttntgcgccctccctgagcaccggctcaggcaccggggtcaggctgcaggaacacatggacagggagaagtaagagtagtccactgcaacgtatgtcagcatgaagttgatggtgacgatgggggccagaacgttcac

SEQ ID NO: 9106 - DNA, 262 bp, Homo sapiens
  unsure (1): n=A,T,C or G
nggtcctagggcactggaagggtaggaggagcacagagaaccttccatggcccctttggttctctgcctttggatggatggatttatgctggcattgtctggagggagccgggtgtcccccaataatcacagaacaaagacaattaggtcgggggaggaataaggataaaaagagaccccaacagaccctgcctgcccttccctgccccccggctgcactgctgaaatatgaggaagagatggctccagtgtggggtgctgg

SEQ ID NO: 9107 - DNA, 343 bp, Homo sapiens
  unsure (25): n=A,T,C or G
  unsure (147): n=A,T,C or G
  unsure (319): n=A,T,C or G
  unsure (330): n=A,T,C or G
  unsure (341): n=A,T,C or G
  unsure (343): n=A,T,C or G
gggtctgtgtttggtggcccaggtnctaatttcaagatgccaggacgttccagttcaaattcaggttcaactggtttcatctccttcagtggtgtagagtctgctctctcctccttgaaaaacttccaagcctgtatcaactctggnatggacacagcttctagtgttgctttggatcttgtggaaagtcagactgaagtgagtagtgaatatagtatggacaaggcaatggttgaatttgctacattggatcggcaactaaaccattatgtaaaggctgttcaatctacaataaatcatgtgaaagaagaacgtccanaaaaaataccngatttacctcngn

SEQ ID NO: 9108 - DNA, 608 bp, Homo sapiens
  unsure (1): n=A,T,C or G
  unsure (567): n=A,T,C or G
nctgataacgttcacagccccatcctcagcacgtggattcgagtcaccgtgagaacccttttgtctccttcagttccggtatctcaccctgtcctcaccttcagggctcccagggcccacactgtggtgggggacctgctggagcttcactgtgagtccctgagaggctctcccccgatcctgtaccgattttatcatgaggatgtcaccctggggaacagctcagccccctctggaggaggagcctccttcaacctctctctgactgcagaacattctggaaactactcctgtgatgcagacaatggcctgggggcccagcacagtcatggagtgagtctcagggtcacagttccggtgtctcgccccgtcctcaccctcagggctcccggggcccaggctgtggtgggggacctgctggagcttcactgtgagtccctgagaggctccttcccgatcctgtactggttttatcacgaggatgacaccttggggaacatctcggcccactctggaggaggggcatccttcaaacctctctctgactacagaacattctggaaactnctcatgtgaggcttgacaatggccctgggggccccagcaca

SEQ ID NO: 9109 - DNA, 443 bp, Homo sapiens
  unsure (1): n=A,T,C or G
  unsure (25): n=A,T,C or G
  unsure (107): n=A,T,C or G
  unsure (161): n=A,T,C or G
  unsure (167): n=A,T,C or G
  unsure (184): n=A,T,C or G
  unsure (201): n=A,T,C or G
  unsure (228): n=A,T,C or G
  unsure (266): n=A,T,C or G
  unsure (285): n=A,T,C or G
  unsure (301): n=A,T,C or G
  unsure (320): n=A,T,C or G
  unsure (324): n=A,T,C or G
  unsure (331): n=A,T,C or G
  unsure (361): n=A,T,C or G
  unsure (363): n=A,T,C or G
  unsure (373): n=A,T,C or G
  unsure (397): n=A,T,C or G
  unsure (409): n=A,T,C or G
  unsure (411): n=A,T,C or G
  unsure (423): n=A,T,C or G
  unsure (424): n=A,T,C or G
  unsure (441): n=A,T,C or G
ngggtccattgcctcggccccaacnacaccaagcccatcaaggttttcattgctcagtcccgatcatctggaagccaccgagatgttgaagatgaagaacttacaanaatctttgttatgataccaaagtcctacacagaagaagatctgcgggaaaaatntaaggngtatggagatatcgagnattgcaccattattaanaataaagtgactggagaaagtaaaggnttgggctacgtacgatacttaaaaccatcacaagctgnccaagcaatagaaaactgngatcgaagctttaganccaatcttggctgaacctnaaantaaagcntctgaatcctctgaacaagattattatagnantatgaggcangaagctctgggacatgaaccctanaataaatatgtntncatttggcaagnngcgccacctttactttnaa

SEQ ID NO: 9110 - DNA, 541 bp, Homo sapiens
  unsure (1): n=A,T,C or G
  unsure (257): n=A,T,C or G
  unsure (380): n=A,T,C or G
  unsure (385): n=A,T,C or G
  unsure (391): n=A,T,C or G
  unsure (392): n=A,T,C or G
  unsure (428): n=A,T,C or G
  unsure (433): n=A,T,C or G
  unsure (477): n=A,T,C or G
  unsure (500): n=A,T,C or G
  unsure (503): n=A,T,C or G
  unsure (509): n=A,T,C or G
  unsure (511): n=A,T,C or G
  unsure (526): n=A,T,C or G
nagaaagtggttgtgatcacaaagcacaacgatgatgaacagtatgcttgggagtcttctgctggaggttccttcactgtgcgtgctgaccatggtgagcccattggcaggggtaccaaagtgatcctccatcttaaagaagatcagacagagtacctagaagagaggcgggtcaaagaagtagtgaagaagcattctcagttcataggctatcccatcaccctttatttggagaaggaacgagagaaggaaattantgatgatgaggcagaggaagagaaaggtgagaaagaagaggaagataaagatgatgaagaaaagcccaagatcgaagatgtgggttcagatgaggaggatgacagccggtaaggataacgaanaacanaactannaagatcaaagagaaatacattgatcaggaagaactnaacangaccaagcctatttggaccagaaaccctgatgacatcccccaanacgagtattggagaattctacanganccctcncntaatgactggggaanaccacttggcagtca

SEQ ID NO: 9111 - DNA, 264 bp, Homo sapiens
ggaacatactgagttaacacattttcctagtagtgatagaattttcagggaagcaagaaaccaagaaaattctggctgctacctaattttaatgaagttggcgattatctgcccacaaggtatgagaagtatagatgtgcattgctctacaaatatacaacgcaataaggcccactcgaaattcatgaaaggcttgccaagccacatggcttgattggtcgtaggtagatgcatgatgtccctcttagaatgaggcccatgttt

SEQ ID NO: 9112 - DNA, 333 bp, Homo sapiens
  unsure (1): n=A,T,C or G
  unsure (173): n=A,T,C or G
  unsure (215): n=A,T,C or G
  unsure (272): n=A,T,C or G
  unsure (310): n=A,T,C or G
ncctgcttcacttgcagataagtttattataattctccagaaatgtgcaggatgtgcattagcaaattgcactgtacttttcactccagcctgggtgacagagcaagactcccgtctcgggggcttaaaaaaaaaaatgctgtatctaaatgaatctgtgtaattgggcccanatgtgggtttgctcagtattagtagacaaggtctttgttcanacgattaggtgcctaactggcaaatgccttagtttcttaaaacgtattttctgatgnggctttacatttcaaaagtgaacttgattcaacctganaaaactgattaaaaaattagttt

SEQ ID NO: 9113 - DNA, 380 bp, Homo sapiens
  unsure (1): n=A,T,C or G
  unsure (8): n=A,T,C or G
  unsure (285): n=A,T,C or G
  unsure (297): n=A,T,C or G
  unsure (328): n=A,T,C or G
  unsure (357): n=A,T,C or G
naaatcanacgtgtaggtttgctttgtattgccctgcatgacacatgtcaggaagatcgccagggaggggaggttacaagcccaggttgcaggaataacctttactctgaattttggtctgaaagacttttccttcgtctggagctgggctggccttgtgatattgtgccacagcagacacgacactgtctccaaggcggagctcattgcctggggctttcccactgcactgaatgagaatttatttggcctttaatgaaattcagattgtcccatttatgcagncctctgtttaangtgacaggcactgaatatggttgctttcaancaagttattttgtttaaccaggggcctancggagttcgggatacacagatgg

SEQ ID NO: 9114 - DNA, 623 bp, Homo sapiens
  unsure (6): n=A,T,C or G
  unsure (487): n=A,T,C or G
  unsure (516): n=A,T,C or G
  unsure (582): n=A,T,C or G
  unsure (621): n=A,T,C or G
ctgaanaagggaagggcagtgatggggttatggaggaagtatggcagggaaagcaggagggtgatgctggaagacaaatggtagatcccaggcggactggaaagaattgcaatagggggagccggggagtgcagtctgtgagaggctggaaatgtgaaagccaggagctctcagggatttgggttgcctcctgcacagtcaaggagagtgtcactcaggctagtcatagatggcatacctacaggcttgggctgattttagatagttgttcagagcagtcaggcaggcgccagaggcacaagccctgtgagaggtgtgtttggaatcacttggtatccaaatcacatgtcatccctaggagcaaggagaccggttggatttggggctggtctggaatgaagaagcatctctcagcttccgaaggctgcatggctcacggcagtatctcaatcatgccctgcccgtttgcacatttggtcctgttggnagttacctctctggtgactggcaaagtcngcaaggatattggggtggagcaccctggctaagcaccctcttgattatagagctatggagtacaanacagatggagaatgagaggacctgccccgggcgggcccnct

SEQ ID NO: 9115 - DNA, 311 bp, Homo sapiens
  unsure (1): n=A,T,C or G
  unsure (213): n=A,T,C or G
  unsure (222): n=A,T,C or G
  unsure (283): n=A,T,C or G
nggtctgggtcagtgctgctctctaaatctttaagttttgttcttctgtactcgctttccctattttcattgctttagttctgcccttcatcatcttgcctgaattagtataaattttctaacaggtctctctgcctccagtatcatacctctctaatcttaagtataaatgtgattatctttttcctgtttgaaatccttcaattacagttncagacacanatctcttcatgatttatcacctgtttacctcttcagacatagcaactttttttttttgganacagagtctcattctattgcccaggtta

SEQ ID NO: 9116 - DNA, 511 bp, Homo sapiens
  unsure (369): n=A,T,C or G
ccagcggaaagttttatttacctgtttcaagaggaatgataaacgtgaagtaaaagttgcccagttggctggctctgttgctgagatgtcggcttatcatcatggagaacaagcattgatgatgactattgtgaatttggctcagaactttgtgggaagtaacaacattaacttgcttcagcctattggtcagtttggaactcggcttcatggtggcaaagatgctgcaagccctcgttatattttcacaatgttaagcactttagcaaggctactttttcctgctgtggatgacaacctccttaagttcctttatgatgataatcaacgtgtagagcctgagtggtatattcctataattcccatggntttaataaatggtgctgagggcattggtactggatgggcttgtaaactacccaactatgatgctagggaaattgtgaacaatgtcagacgaatgctagatggcctggatcctcatcccatgcttccaaactacaaaaacttt

SEQ ID NO: 9117 - DNA, 617 bp, Homo sapiens
  unsure (1): n=A,T,C or G
  unsure (3): n=A,T,C or G
  unsure (13): n=A,T,C or G
  unsure (546): n=A,T,C or G
ngncttgcctcanatccaaggtcactcggaagaggccatgtctaccctcaatgacactcatggaggaaatgctgagagaagcattcagatgcatgacacaaggtaagactgccaaaaatcttgttcttgctctcctcattttgttatttgttttatttttaggagttttgagagcaaaatgacaacacccagaaattcagtaaatgggactttcccggcagagccaatgaaaggccctattgctatgcaatctggtccaaaaccactcttcaggaggatgtcttcactggtgggccccacgcaaagcttcttcatgagggaatctaagactttgggggctgtccagattatgaatgggctcttccacattgccctggggggtcttctgatgatcccagcagggatctatgcacccatctgtgtgactgtgtggtaccctctctggggaggcattatgtatattatttccggatcactcctggcaccaacggagaaaaactccaggaagtgtttggtcaaaggaaaaatgataatgaattcattgancctctttgctgcatttctggaatgattctttcaatcatggacatacttaatattaaaatttcccatttttt

SEQ ID NO: 9118 - DNA, 214 bp, Homo sapiens
  unsure (1): n=A,T,C or G
nggtctgaataggcacccaaaagtccgtgactaaatttcgtttgtctttttgatagcaaattatgttaagagacagtgatggctagggctcaacaattttgtattcccatgtttgtgtgagacagagtttgttttcccttgaacttggttagaattgtgctactgtgaacgctgatcctgcatatggaagtcccacttcggtgacatttcctgg

SEQ ID NO: 9119 - DNA, 357 bp, Homo sapiens
ccacactgtgaaccctcccagagactttagacagagagaggggctccacaacaccccggtattctgtctgccctctctcacccccttccctgtccacacaggtcagcccaaggccaaccccactgtcactctgttcccgccctcctctgaggagctccaagccaacaaggccacactagtgtgtctgatcagtgacttctacccgggagctgtgacagtggcctggaaggcagatggcagccccgtcaaggcgggagtggagaccaccaaaccctccaaacagagcaacaacaagtacgcggccagcagctacctgagcccgacgcccgagcagtggaagtcccacagaagctacag

SEQ ID NO: 9120 - DNA, 457 bp, Homo sapiens
  unsure (4): n=A,T,C or G
  unsure (9): n=A,T,C or G
  unsure (21): n=A,T,C or G
ctgncttancaagcaccctangagcatgaatatacaaagaccacaagcttacacatctttttaacatacacaaccgattttacttacctagccaaggcatattcttcctgtgcggtacctccacctacctctgctaccctatcaactggactggtacctgtactctggtttttctaagcccaaaaatcgacattgtcccaggagaacaaaacctacctatccctgtaaaaactcaagtgtgccaatgcagggccgttcagttaatacccatcctagtacgactaggaatgactactgcagttggaaccggagtggtcgggctttctacttccctcatgtactattgctccctctcacaagatcttacaaacagtttggaagacttacctaatactgtttcaaccctccaatcacagatagactccttagcagcagttgtccttcaaaatcgcagagg

SEQ ID NO: 9121 - DNA, 241 bp, Homo sapiens
aaatgacccgtaactaaatcctagatttttatctagtcagtttctttttttccaagtcctatctttcacagttgtgcttctgggatttactcacagccatactaactgggagtcaagaaaagggataaggggaataacggggcttagtaagctctggaattactggatgaacacatcttatgagatgaaacaatgacaggaacgctaccaaggcagcagtgtcaccgcatttgacgttttt

SEQ ID NO: 9122 - DNA, 347 bp, Homo sapiens
  unsure (1): n=A,T,C or G
  unsure (37): n=A,T,C or G
  unsure (38): n=A,T,C or G
  unsure (163): n=A,T,C or G
  unsure (173): n=A,T,C or G
  unsure (239): n=A,T,C or G
  unsure (243): n=A,T,C or G
  unsure (245): n=A,T,C or G
  unsure (258): n=A,T,C or G
  unsure (299): n=A,T,C or G
  unsure (347): n=A,T,C or G
nggtccgccgcggactccggcagctttatcgccagannccctgaactctcgctttctttttaatcccctgcatcggatcaccggcgtgccccaccatgtcagacgcagccgtagacaccagctccgaaatcaccaccaaggacttaaaggagaagaaggaagntgtggaagangcagaaaatggaagagacgcccctgctaacgggaatgctaatgaggaaaatggggagcaagaggcngacnangaggtagacgaanaagaggaagaaggtggggaggaagaggaggaggaagaatanggtgatggtgaggaagaggatggagatgaagatgaggaagctgagtcn

SEQ ID NO: 9123 - DNA, 204 bp, Homo sapiens
ctggtcctccagccgcctcagctccttcacagagctctcctggaaggactcctgggtcatgctggtcccagagagagaagagtaagcctcggatctctttggtgggaggtaaggccacaccaaagatgaaagaggaccccctagtgggctcccgtcaggagagcgggtgcccagcactcattgtgaacctgagaaggggcaagg

SEQ ID NO: 9124 - DNA, 356 bp, Homo sapiens
  unsure (23): n=A,T,C or G
  unsure (24): n=A,T,C or G
  unsure (45): n=A,T,C or G
  unsure (114): n=A,T,C or G
  unsure (124): n=A,T,C or G
  unsure (206): n=A,T,C or G
  unsure (216): n=A,T,C or G
  unsure (224): n=A,T,C or G
  unsure (225): n=A,T,C or G
  unsure (233): n=A,T,C or G
  unsure (262): n=A,T,C or G
  unsure (292): n=A,T,C or G
  unsure (297): n=A,T,C or G
  unsure (315): n=A,T,C or G
  unsure (343): n=A,T,C or G
  unsure (356): n=A,T,C or G
gcctggtaggttaaggaacagannacattttgagagacgcttggngccaatgaagtggctgaagaaatgtctggatacaggttttccaatttaccatttgtgtctggggatagngggaggcagncccatctatggcttggggaggctgtagccattcctcctctttcccttgtaagagtgagaaacccatccatggccttctctantcaatacagnggcctggnntgaattanacaaaggaatcccctttgggaggatacancccctatgccaggatgtatggcatggtgancagantgcaccgctttcacttgnttctttggctaggagtgtttgcgcagtnccccaaccacacn

SEQ ID NO: 9125 - DNA, 622 bp, Homo sapiens
  unsure (383): n=A,T,C or G
  unsure (401): n=A,T,C or G
  unsure (451): n=A,T,C or G
  unsure (535): n=A,T,C or G
  unsure (537): n=A,T,C or G
  unsure (568): n=A,T,C or G
  unsure (614): n=A,T,C or G
  unsure (617): n=A,T,C or G
ctggcagctcacattttacattagagagtggggtccccacattttacattacagagcggggtccctgagctgcaggaggagagcctgcagggctcttgggtagaattgcacttttgcaataagggaaacgggagcaatgtttcagcctcagtttctatttataatactgacacaaaaagaatattgctggatacatagcatggatctagatagagcagctccaggagttctcacggtgacagcccccctcactcacagacaccatgtgatattaatagggcttagacacaaagcactgaattcccaaagcattgaagagaaagacagctctcagtctgagtaaaaccgtattgagagaagaaaagaggttgaaagaatcttanagacaaattcagattacntgtaacattggtcaaattgaccagaaaatattcttccaaagaagttcttntctaaacaccaaaagtgcacagctactctcagcatgagaaatacaagtattatgagaaagagggcttattctgagcagaatttncntctctgctgctctcccatctgcccggcccgntgggatttggggaaatctatacttggaacacacctgacaacctccnccngactt

SEQ ID NO: 9126 - DNA, 144 bp, Homo sapiens
  unsure (5): n=A,T,C or G
  unsure (18): n=A,T,C or G
  unsure (40): n=A,T,C or G
  unsure (42): n=A,T,C or G
  unsure (55): n=A,T,C or G
  unsure (58): n=A,T,C or G
  unsure (64): n=A,T,C or G
  unsure (68): n=A,T,C or G
  unsure (79): n=A,T,C or G
  unsure (112): n=A,T,C or G
  unsure (118): n=A,T,C or G
  unsure (120): n=A,T,C or G
  unsure (127): n=A,T,C or G
aaagngagcagcgccaanttccttaaagataagcttgggnanataggagcacacnaanatgagntcanctttgaacagntccatctcttctataaaaaacttatgttttgancagcananatcgatnctcgatgaattcaaaaa

SEQ ID NO: 9127 - DNA, 657 bp, Homo sapiens
  unsure (1): n=A,T,C or G
  unsure (408): n=A,T,C or G
  unsure (521): n=A,T,C or G
  unsure (530): n=A,T,C or G
  unsure (627): n=A,T,C or G
  unsure (641): n=A,T,C or G
nggtaaaattgttttgtattttcttattcctgttccctttaccctttgacaacttgaaatgttaccacttcgtcctcatgatgttcttctatcaaccctgcttaggatgagaacaagttgagcagtgccaacggccatgaagaacgtagcaaaaaacaaactttctgcctccttggaaagctctacatctccttgtgattggagtgtgggtttcaagattccagaaggaggaaaaaaagcaagagcagaagtcgtagtcatgaacgaaagagaagcaaaagtaaggaacggaagcgaagtagagacagagaaaggaaaaagagcaaaagccgtgaaagaaagcgaagtagaagcaaagagaggcgacggagccgctcaagaagtcgagatcgaagatttagaggccgntacagaagtccttactccggaccaaaatttaacagtgccatccgaggaaagattgggttgcctcatagcatcaaattaagcagacgacgttcccgaagcaaaagtccattcanaaaagacangagccctgtgagagaacctattgataatttaactcctgaggaaaagagatgcaaggacagtcttctgtatgcagacctcggccgcgaccccgctaanggcggaattcccancaccctgggcggcccg

SEQ ID NO: 9128 - DNA, 292 bp, Homo sapiens
  unsure (1): n=A,T,C or G
  unsure (89): n=A,T,C or G
  unsure (198): n=A,T,C or G
  unsure (203): n=A,T,C or G
  unsure (217): n=A,T,C or G
  unsure (222): n=A,T,C or G
  unsure (263): n=A,T,C or G
  unsure (284): n=A,T,C or G
  unsure (285): n=A,T,C or G
  unsure (290): n=A,T,C or G
naaatttgaaaagcatcatgttctcatgatttatgggaatgaagcaagtactgaaatcaaattaaatactccctgggtcctgggtcagnttgaccctagccctggggtgaggcaagccccctcctatgaggatgagcaaaaatactactctcttcgccctgagttgctttctggatctggggcttcaggacttgctgnttcantcagcctttattancaccnaagactttatgaagatcccacacacagacacacatcccttncccgcctcccccctgcccttnngtagnat

SEQ ID NO: 9129 - DNA, 113 bp, Homo sapiens
  unsure (2): n=A,T,C or G
  unsure (23): n=A,T,C or G
anataagctgctatcagaagagntatcacttcgatttgcaagttccacagcatcagatgtcacatggtcaagagaatctattcctgatttatccatcaattgctctttgtttt

SEQ ID NO: 9130 - DNA, 431 bp, Homo sapiens
  unsure (2): n=A,T,C or G
  unsure (73): n=A,T,C or G
  unsure (151): n=A,T,C or G
  unsure (154): n=A,T,C or G
  unsure (165): n=A,T,C or G
  unsure (168): n=A,T,C or G
  unsure (182): n=A,T,C or G
  unsure (184): n=A,T,C or G
  unsure (193): n=A,T,C or G
  unsure (261): n=A,T,C or G
  unsure (265): n=A,T,C or G
  unsure (320): n=A,T,C or G
  unsure (344): n=A,T,C or G
  unsure (366): n=A,T,C or G
  unsure (379): n=A,T,C or G
  unsure (381): n=A,T,C or G
  unsure (394): n=A,T,C or G
  unsure (398): n=A,T,C or G
  unsure (404): n=A,T,C or G
  unsure (411): n=A,T,C or G
  unsure (429): n=A,T,C or G
cngatgccccaggaggccggcctggcggaggagttcctgctcactgacaatagtgccatatggcaaacggtanaagaactggattacttacaagtggaggctgaggccaagatggagaacttgcgagctgcagtgccaggtcaacccctanctntggtgctggancanggcctgatataggngngtggccctnacagactgcccgtggtggccccaaggacacccagcccagctatcaccatggcaatggaccttacaacnaccnggacatccctggctgctggtttttcaagctgcctcacaaggatggtaatacctgnaatgtgggaagcccctttgccaangacttccctgcccaaaatggangatggcaccctgnangctggcccaggangtgncagtgngccccgngctctggcaaatcaacanaa

SEQ ID NO: 9131 - DNA, 317 bp, Homo sapiens
  unsure (61): n=A,T,C or G
  unsure (152): n=A,T,C or G
  unsure (159): n=A,T,C or G
  unsure (166): n=A,T,C or G
  unsure (172): n=A,T,C or G
  unsure (208): n=A,T,C or G
  unsure (212): n=A,T,C or G
  unsure (312): n=A,T,C or G
accttttccatgtatgaacctggctctgccctgaagccctttgggggcccccctggggacnagctcactacgcggctgcagcctttccacagcactgagctagaggacgacgccatctattcagtgcacgtccctgctggcctttaccgggnaagcctnggggaancgtgtncatcttaaccagtaggttctgagccccagggggttntggnctctgcgctgaattcggggcttaagatgattagactgaccttggtccctgctgcactgctggtgagcaggggggcagtggggcacactgactccatccancgctg

SEQ ID NO: 9132 - DNA, 224 bp, Homo sapiens
aaacaatgaaactttttcaaaaagaaaaaacaaaaactttaactttgtgtaaaatcttatagtattatcagcttagagggaattgatatttttaatattgccgttatattccaaaatatatattgagataaatgaactggtgtagaatatcagtttgctatttagttttatgaattactatacatatacatgcatagaaatgaaatgctatactgataaatttt

SEQ ID NO: 9133 - DNA, 486 bp, Homo sapiens
  unsure (159): n=A,T,C or G
  unsure (233): n=A,T,C or G
  unsure (253): n=A,T,C or G
  unsure (297): n=A,T,C or G
  unsure (350): n=A,T,C or G
  unsure (358): n=A,T,C or G
  unsure (419): n=A,T,C or G
  unsure (420): n=A,T,C or G
  unsure (443): n=A,T,C or G
  unsure (444): n=A,T,C or G
  unsure (465): n=A,T,C or G
  unsure (470): n=A,T,C or G
  unsure (473): n=A,T,C or G
cctgttctgttcctggaagttcctgtaacattgagtgtcaccactttactgtgctgggcccccaggccattgtcagcctcacatgagtagtttccagaatgttctgtagtcagagagaggttgaaggatgcccctcctccagagtgggccgagatgttncccaaggtgtcatcctcgtgataaaaccagtacaggatcgggaaggagcctctcagggactcacagtgaagctncagcaggtcccccaccacanctgggccccgggagccctgacggtgaggacggggcgagacaccngaactgtgaccctgagactcactccatgactgtgctgggcccccaggccattntctgcatnacaggagtagtttccagaatgttctgcagtcataatagaggttgaaggacgctctcctccnnaggggggctgagctgtttccccnngggtgacatccttcatgatanaaatnggnacagggattcggg

SEQ ID NO: 9134 - DNA, 150 bp, Homo sapiens
  unsure (8): n=A,T,C or G
  unsure (10): n=A,T,C or G
  unsure (146): n=A,T,C or G
  unsure (147): n=A,T,C or G
ttcacaantnccctagcatcatagttgggtagtgttacaagcccatccagtaccaatgccctcagcaccatttattaaaaccatgggaattataggaatataccactcaggctctacacgttgattatcatcataaaggaacttanngga

SEQ ID NO: 9135 - DNA, 229 bp, Homo sapiens
  unsure (189): n=A,T,C or G
ctgcgattttgaaggacaactgctgctaaggagtctatctgtgattggagggttgaaacagtattaggtaagtcttccaaactgtttgtaagatcttgtgagagggagcaatactacatgagggaagtagaaagcccgaccactccggttccaactgcagtagtcattcctaggcgtactacgatgggnattaactgaacggccctgcattggcacacttgagttttta

SEQ ID NO: 9136 - DNA, 204 bp, Homo sapiens
  unsure (1): n=A,T,C or G
  unsure (2): n=A,T,C or G
  unsure (91): n=A,T,C or G
  unsure (134): n=A,T,C or G
  unsure (153): n=A,T,C or G
  unsure (157): n=A,T,C or G
nnttgccccttctcaggttcacaatgagtgctgggcacccgctctcctgacgggagcccactagggggtcctctttcatctttggtgtggncttacctcccaccaaagagatccgaggcttactcttctctctntgggaccagcatgacccangagnccttccatgagagctctgtgaaggagctgaggcggctggaggaccat

SEQ ID NO: 9137 - DNA, 199 bp, Homo sapiens
  unsure (30): n=A,T,C or G
  unsure (31): n=A,T,C or G
  unsure (33): n=A,T,C or G
  unsure (55): n=A,T,C or G
  unsure (163): n=A,T,C or G
  unsure (168): n=A,T,C or G
  unsure (186): n=A,T,C or G
  unsure (196): n=A,T,C or G
taccataagaaaaacacaacagttttaggnngntgataaattaattcctctctgntgtaaacctaaaactaaacaaaaacaaaaatacccagagcagatggggagagggtgggaggcggaacacacactcatacacacacacacactcacgcacacacacaancagtncacgttaagctctgcatncccactatanggg

SEQ ID NO: 9138 - DNA, 113 bp, Homo sapiens
  unsure (3): n=A,T,C or G
  unsure (30): n=A,T,C or G
ttnacaaagagcaattgatggataaatcangaatagattctcttgaccatgtgacatctgatgctgtggaacttgcaaatcgaagtgataactcttctgatagcagcttattt

SEQ ID NO: 9139 - DNA, 235 bp, Homo sapiens
  unsure (34): n=A,T,C or G
  unsure (76): n=A,T,C or G
  unsure (167): n=A,T,C or G
  unsure (219): n=A,T,C or G
  unsure (229): n=A,T,C or G
acaaaagtgtttggagtttgtacttattcctgcnttgaactttatttcttgtctttctattcttacttaagctgtngttatagaaaaccggagcttgagtttctgaaaaagactgatgggctacttctttatagataaaaaggggttcataaattagtgcaaatatnttaggaccttttcagcacttggcgtaggatggaagaggtaagaggtaagaanatactctgtngaagtt

SEQ ID NO: 9140 - DNA, 249 bp, Homo sapiens
  unsure (161): n=A,T,C or G
  unsure (223): n=A,T,C or G
  unsure (245): n=A,T,C or G
aggccaggaaatcaaagagaagatggaacgctgcgacaaagaaggtcagcgccaggaagtataagttggtatctacaaaaattcctttcacctcatcagcatctttctctgaaaacccgaactgctgcagggagtacacggcgtcctgcatgtggatccanaagcgcagccgccccagggagaccttgtcgtaggacacggtgaggggcagctcggtggtggnaagcggattatgaccatcaggnccct

SEQ ID NO: 9141 - DNA, 237 bp, Homo sapiens
  unsure (26): n=A,T,C or G
  unsure (63): n=A,T,C or G
  unsure (75): n=A,T,C or G
  unsure (136): n=A,T,C or G
  unsure (161): n=A,T,C or G
  unsure (187): n=A,T,C or G
  unsure (194): n=A,T,C or G
  unsure (215): n=A,T,C or G
  unsure (226): n=A,T,C or G
caaaatctttataaactgtgtctganaaagtgcacacgtgtgtgtgacatgctcaaaggtcanacaaggggtggncaggaagggatgtattttacaagccacttgtatctttttccaaaaacacctacccatgttnggggaatgttaaacaaaatcaaaanacaaccttttgtagccgttggaagcntcatgtnctttcttctaacttggcttcnccagcggaagngaccgtggtgg

SEQ ID NO: 9142 - DNA, 247 bp, Homo sapiens
  unsure (1): n=A,T,C or G
  unsure (32): n=A,T,C or G
nttatatattcatctataatagcaaagacaanagtgtatcttccagaagatgcctctggttgctaaccagtctctgtgaagaagctgcagttacccaggcttctgtaactcaggacattgaagtagtcatgcagctcggcacagtcccctccccgctgctctccacagagcccagcaggtgcagcttctgcctggacacagcttcctgggggtgagggagcactggggctccattcctcctgtccag

SEQ ID NO: 9143 - DNA, 214 bp, Homo sapiens
  unsure (15): n=A,T,C or G
  unsure (83): n=A,T,C or G
  unsure (208): n=A,T,C or G
  unsure (209): n=A,T,C or G
tttctcaggttgaancaagttcacttttgaaatgtaaagccacatcagaaaatacgttttaagaaactaaggcatttgccagntaggcacctaatcgtctgaacaaagaccttgtctactaatactgagcaaacccacatctgggcccaattacacagattcatttagatacagcatttttttttttttaagcccccgagacgggagnnttgct

SEQ ID NO: 9144 - DNA, 217 bp, Homo sapiens
  unsure (4): n=A,T,C or G
  unsure (6): n=A,T,C or G
  unsure (33): n=A,T,C or G
  unsure (37): n=A,T,C or G
  unsure (73): n=A,T,C or G
  unsure (131): n=A,T,C or G
  unsure (153): n=A,T,C or G
  unsure (164): n=A,T,C or G
  unsure (188): n=A,T,C or G
  unsure (199): n=A,T,C or G
  unsure (208): n=A,T,C or G
tgtntnaaatcatagaatctgctcgaagaaganaatnaggacctgctatccactgggagaggctatcagccantcctgggacttggagacccagcatcctttgcattactttttccttcaggatgatctanagcagcatggagctgttggtanaatattagttnttaaccatacattgtcccaaaagngtctgtgcatngtgcaaaanggaaactta

SEQ ID NO: 9145 - DNA, 254 bp, Homo sapiens
  unsure (119): n=A,T,C or G
  unsure (202): n=A,T,C or G
  unsure (224): n=A,T,C or G
  unsure (225): n=A,T,C or G
  unsure (227): n=A,T,C or G
  unsure (236): n=A,T,C or G
  unsure (248): n=A,T,C or G
ccaaataatgggggagaactgtcagtgcccacacccatttctcagtggtcagtttcagccgctgttgactgaagacaaacgaactcactatgttcttcacaaagatcattttttttaantaagaaaaatgtttcaactctcttgcctttccttcagcgaatgaaatgtgacgggctaaatacgccagtcactcatgcgccgnagggacacatggtgcatactgnngngcccaggtngcaaacagaatncccaag

SEQ ID NO: 9146 - DNA, 166 bp, Homo sapiens
  unsure (17): n=A,T,C or G
  unsure (21): n=A,T,C or G
  unsure (51): n=A,T,C or G
  unsure (58): n=A,T,C or G
  unsure (80): n=A,T,C or G
  unsure (85): n=A,T,C or G
  unsure (88): n=A,T,C or G
  unsure (89): n=A,T,C or G
  unsure (127): n=A,T,C or G
  unsure (129): n=A,T,C or G
  unsure (149): n=A,T,C or G
  unsure (150): n=A,T,C or G
attgtgggtccaccacnccanctttgcttcattttacttctgctgcctctnctttctnttgctaccctgtgctgcatgangaatntannataatttgtaacaccctgggattccttaaagaaaacananaaggactagactcccctttnngggagcaactctctgt

SEQ ID NO: 9147 - DNA, 243 bp, Homo sapiens
  unsure (34): n=A,T,C or G
  unsure (122): n=A,T,C or G
  unsure (180): n=A,T,C or G
  unsure (183): n=A,T,C or G
  unsure (213): n=A,T,C or G
  unsure (222): n=A,T,C or G
  unsure (223): n=A,T,C or G
  unsure (232): n=A,T,C or G
  unsure (242): n=A,T,C or G
ccacttgtgtgggtcctcacaagcaaagagagcnctaaacttgacattgggggtccaccactccaactttgctttctgaaggttttggtgtacattgagccccagaaggaaaggagagtatntgtgagtgggggcctcccttgaccccagtacgaagtctatgccctgaatccccagagnagnccctcctggtgcccaactggcctggggacnaacagcggnncactacatntaggactgcnt

SEQ ID NO: 9148 - DNA, 109 bp, Homo sapiens
  unsure (91): n=A,T,C or G
  unsure (93): n=A,T,C or G
tcaccctgaccatcaacagggtcgaagccggggatgaggccaactattactgtcaagtgtgggatccgtaataatgaccatgtcgtcttcngnggagggaccaaactgg

SEQ ID NO: 9149 - DNA, 510 bp, Homo sapiens
  unsure (472): n=A,T,C or G
  unsure (481): n=A,T,C or G
  unsure (504): n=A,T,C or G
ctgaggacaaacatgagatgagcatagtcagggacagatgtttgggagaaacaaaaggagggtaagtaggaagcgcagggcaaaggcaggcagagcgagtattgcagcagcctttgctgcgtgctgggaagtttctaacaatgcagggctcttggaaagcactgagattgcagcacttgttttgatagcgaggcaaggagtcacaaagtcaggcaaggagggtcatggaaagcggggtgacagagggagaagtccggggcggtggctctcctctaaagcctgtacctagtcctcatctctctccagcctctttacaatgttcatccatggaaagtgaagcccagagaagttaagtaacttgcttaaggtcacacagcagcgttgacaaaaacaaacatacacaaaaaaataaatcacggccaggcacggtggctcacgcctgtaatcccaacattttggaaggctgacgcangaagatcanctgaggtcaggaggtggacaccngcatgg

SEQ ID NO: 9150 - DNA, 293 bp, Homo sapiens
  unsure (1): n=A,T,C or G
  unsure (57): n=A,T,C or G
  unsure (125): n=A,T,C or G
  unsure (155): n=A,T,C or G
  unsure (221): n=A,T,C or G
  unsure (226): n=A,T,C or G
  unsure (243): n=A,T,C or G
  unsure (247): n=A,T,C or G
  unsure (264): n=A,T,C or G
  unsure (275): n=A,T,C or G
  unsure (277): n=A,T,C or G
  unsure (281): n=A,T,C or G
nggtaaatttgagtaatttcaaattccacaaacaaaactgaagaacagcaatatttngtttgaatttctctcttctgtacactcagtgatctaaaacaccacaatatccaacatacacaaacctnagggaagggttagtaaacacacacaagatnggaatcatggtgctctttgttcctgaatggaatggtcccacagaaaaagcacaggatacagcacancatangggcacctgttacatangaantgagcaaaacatactancatcttctatntncatnatggggaaacct

SEQ ID NO: 9151 - DNA, 96 bp, Homo sapiens
  unsure (1): n=A,T,C or G
  unsure (3): n=A,T,C or G
  unsure (5): n=A,T,C or G
  unsure (60): n=A,T,C or G
  unsure (89): n=A,T,C or G
ngncntgaggaagctcttcattggagggttgagctttgaaacaactgatgagagcctgangagccattttgagcactggggaacgctcncggactg

SEQ ID NO: 9152 - DNA, 263 bp, Homo sapiens
  unsure (1): n=A,T,C or G
  unsure (25): n=A,T,C or G
  unsure (89): n=A,T,C or G
  unsure (96): n=A,T,C or G
  unsure (163): n=A,T,C or G
  unsure (167): n=A,T,C or G
  unsure (185): n=A,T,C or G
  unsure (195): n=A,T,C or G
  unsure (206): n=A,T,C or G
  unsure (223): n=A,T,C or G
  unsure (250): n=A,T,C or G
  unsure (256): n=A,T,C or G
nggtctgtgaaaaaagccatttccnaagattctggctgtgactcagtcactgacactgagcctgaggacgagaaggttgtttcctactngaagcancagaacctgccgacggtgacttcacctgggaacctgatggtggtgcagcccggaccgcattcgctgngggncaaaaaccactggctatnttattgtganatgtaagctgnatgacagggtggcgacncgaacgacagttttctcctgaggattntccctntgcaagg

SEQ ID NO: 9153 - DNA, 292 bp, Homo sapiens
  unsure (256): n=A,T,C or G
ccatgtccccagaattgaagccagagaatcgctcagatatccctgagggccggtcgttatcaaaaaagatgattaggacaggggcctggcctggcttctggtaataccagtgtacattgttactcccaatattgtttcccccacaggtaatcttggccgtctttcctggggccactgacactgagggtgtctgagtcaacacataggaggtcacagagtctgtgcagtgagagaggaggccgaggaggagaacggnccaggccatggctgaggcaccaccagtgctgcttcc

SEQ ID NO: 9154 - DNA, 306 bp, Homo sapiens
  unsure (65): n=A,T,C or G
  unsure (161): n=A,T,C or G
  unsure (168): n=A,T,C or G
  unsure (215): n=A,T,C or G
  unsure (230): n=A,T,C or G
  unsure (232): n=A,T,C or G
  unsure (242): n=A,T,C or G
  unsure (255): n=A,T,C or G
  unsure (278): n=A,T,C or G
  unsure (292): n=A,T,C or G
gaaaaaataggacctattttttaagactttacagcctttgaaatggtttccacgtgattgttacnccagcagttctcgttttgtttgtttttcaatctcagtgaaatggctctttgctttcgagttctcacgcaacgtactgggcaaatgacaatcctcanccgctgntattttctaaggggtctcttcactttgatgagtgacatgaacaccgngtctccttctcttgngngtaccctaanccatatttccaancctgtggtactccaggattccangagtaagcctgtanaagagatttatttt

SEQ ID NO: 9155 - DNA, 510 bp, Homo sapiens
  unsure (417): n=A,T,C or G
  unsure (484): n=A,T,C or G
  unsure (485): n=A,T,C or G
  unsure (488): n=A,T,C or G
  unsure (500): n=A,T,C or G
cctactagacccctcttattaacctggggcaaacccatttggtaaaagatgactattgagtcttacccctacctgctccaggttagtacacaccaggcaacaggtggcattctaccctacccctttctggaggtggttctggacacctcaaaacctttgacatttgaattaacacgctaagacatctgcaaatgaacaatcagacaaagcattgctgggagttgggaattttggaaactctgttcacttaccaccaaatttattgaagccaccacggtcacttccgctggagaagacaagttagaagaaaggacatgaagcttccaacggctacaaaaggttgttttttgattttgtttaacattccccaaacatgggtaggtgtttttggaaaaagatacaagtggctactaaaanacatcccttcctgaccaccccttgtctgacctttgagcatgtcacacacacgtgtgcaatttctcannacncagtttataaanattttgcttt

SEQ ID NO: 9156 - DNA, 191 bp, Homo sapiens
  unsure (1): n=A,T,C or G
nggtctgaatcttcggtgattttctcgatgtcgctgttcttgcaggtcttctgcatggcctcctgcttgctgctttcaccattgctggtggatggcatctcatcactggcccatttagagaactcaggtgtgatgccgcgtgctgggagggccgccactggaggaaaggagggaggaaaaacaaagtgagg

SEQ ID NO: 9157 - DNA, 291 bp, Homo sapiens
  unsure (1): n=A,T,C or G
  unsure (92): n=A,T,C or G
  unsure (263): n=A,T,C or G
nggtaaaacaggagtgaagagagcagaaatctccaatgccatcgatcaatatgtgactggaaccattggcgaggatgaagatttgataaagnggaaggcactgtttgaggaagtccctgagttactcactgaggcagagaagaaggaatgggttgagaaactgactgaagtttctatcagctctgatgctttcttccctttccgagataacgtagacagagctaaaaggagtggcgtggccgtacattgcggctccctccggntctgctgctgacaaagttgtgattgagg

SEQ ID NO: 9158 - DNA, 643 bp, Homo sapiens
  unsure (373): n=A,T,C or G
  unsure (437): n=A,T,C or G
  unsure (475): n=A,T,C or G
  unsure (481): n=A,T,C or G
  unsure (521): n=A,T,C or G
  unsure (522): n=A,T,C or G
  unsure (532): n=A,T,C or G
  unsure (549): n=A,T,C or G
  unsure (565): n=A,T,C or G
  unsure (572): n=A,T,C or G
  unsure (594): n=A,T,C or G
  unsure (606): n=A,T,C or G
  unsure (618): n=A,T,C or G
  unsure (623): n=A,T,C or G
  unsure (642): n=A,T,C or G
aaatgatgccttgacttttgaattcaattctagaaccaattatcctaaactaaatcagagtattacaaatgaagatattccaacacaaagacttgtaggattttgtttagattgtcaatggttgattcatccaaattttcttcattgtcatccatggtgtgccagacttcagggaaaggagacggtatcagatgcagaactggaacacctcttcttaaaaatggaatatggtcatcctgaatcacacctccataactgtaattctggaaataccgcccctccaaagagtgatccttgagcaaacccaattcatgaagttcatgttcaattgcttgaagtctttcgaaccacctggctgagtttggaaaaaaantgggaaacgttgggtttggagctccaatcaaatccaataagaccaataaatccatgccatgcanttggctggtgcctctcgctccaggtgggtgcggggtcnatgccntctttcagctaagtgccagacccatagaggagaatcttgnncgagaccagngaacaaaagcctcttcnccctcaaagaagatcnacctggngtgaccaaatctggcttgggantctgaaacacgncctttaaggaanggaantttctttgtctaaggcacng

SEQ ID NO: 9159 - DNA, 318 bp, Homo sapiens
  unsure (4): n=A,T,C or G
  unsure (5): n=A,T,C or G
  unsure (24): n=A,T,C or G
  unsure (26): n=A,T,C or G
  unsure (32): n=A,T,C or G
  unsure (33): n=A,T,C or G
  unsure (53): n=A,T,C or G
  unsure (62): n=A,T,C or G
  unsure (64): n=A,T,C or G
  unsure (78): n=A,T,C or G
  unsure (87): n=A,T,C or G
  unsure (102): n=A,T,C or G
  unsure (153): n=A,T,C or G
  unsure (164): n=A,T,C or G
  unsure (185): n=A,T,C or G
  unsure (189): n=A,T,C or G
  unsure (197): n=A,T,C or G
  unsure (207): n=A,T,C or G
  unsure (212): n=A,T,C or G
  unsure (232): n=A,T,C or G
  unsure (241): n=A,T,C or G
  unsure (243): n=A,T,C or G
  unsure (257): n=A,T,C or G
  unsure (285): n=A,T,C or G
  unsure (289): n=A,T,C or G
gggnntgttctgggatagaaggcncnctgcannccaaaagggcaggaaggttncaatcctangncactgggacctttnctttctttntttcccaaaactccnggctggaacaaggaacttaaagttctcttttgccttgatggcttctcacanacatcttaaancacctgatgaaggatatgaanaganactacganatttagaaangaccnaggtcctctgataatatganccagttgtnangtaccttcagctgncgggcattccctctccacaggaacaggnggtntgatacaagggcaccacacggaggacctc

SEQ ID NO: 9160 - DNA, 591 bp, Homo sapiens
  unsure (1): n=A,T,C or G
  unsure (8): n=A,T,C or G
  unsure (534): n=A,T,C or G
  unsure (536): n=A,T,C or G
naaagtancaggtttaggttttgctacattctcaaaagacagcaggagtatttgacacatctgtgatggagtatacaacaatgcattttaagagcaaatgcaacaaaacaaatctggactatggataaataatttgagagctgccacccacaaatataaatacagtactcatgctgactgaaataataagacatctacaaatttataaacaaaaagtgattgtcattatcctgcttatgtactagattcaggcaagcattatagactttttggttgcggtggcttttgcatttatattatcaatgccttgcaggaacgttgcattgataggcccattttatttttttattttttttttcgagacaggatctcactctgtagcacaggctggattgcagtgcaatcctgcaattctcaatcttgcactgcagcctcgacctcccaggctccagtgactctcccacctcagcctcctaagtagctgggagtacaggccgcaccaccacgcctagctgatttttgtattttttttgnanagacggggggtttgggacctgccccgggcgggccaaggggcgaaattcccagcac

SEQ ID NO: 9161 - DNA, 161 bp, Homo sapiens
ctacctgcgctggccgaatctctgcttttaggagctcactcctcataggtagagttgacaataagcacacaaacaagtgagatagcagggcagccggaccacccagttgggcaattcgtggcttggcctaggaacgttacatttgactgaggctggcgagg

SEQ ID NO: 9162 - DNA, 587 bp, Homo sapiens
  unsure (1): n=A,T,C or G
  unsure (496): n=A,T,C or G
  unsure (515): n=A,T,C or G
nctgcaaataatcagaagccaaggccaggccatcgatttgacactgcaggcagatgaggtcttgggatgcctcttgcgttcccccttctgtgggagcaggtgccttcccaacctcagcactcagtcccaatctctcttccactctcctgggttcaaacaggaacctctctgttggcacgaagcttttgaggggagcaggtctaacaagaaggaaaaaggggggttattagcacggaagccccaccctgccaccaggttggctggggacagggaccaatccaccaggctcgggaggcttggggtggggcagggaagtcttcctccatccctcaaatttagggaaccactgggagccccagactcaggctgaaaatgtctttctgcaaatataaaactctttttaatgaatttgcctaatttctcagagaccctgggctggagaaccagtgcaatgtcacacgggagaggaaggactgtcctgtttattgggagggangagggggatgctggtgcancctgctcaggagtcacccagggtctgagggctgacttgcagctctgggccagaccttgcccggggcggccgg

SEQ ID NO: 9163 - DNA, 578 bp, Homo sapiens
  unsure (424): n=A,T,C or G
  unsure (445): n=A,T,C or G
ctggtggttaacaagtggatcgtcatgttcagtagtttatacattatgtgagaagtaacgttctgattctttttcttacacagaattggcagagggggtcgatttgggaggaaaggtgtggctataaactttgttactgaagaagacaagaggattcctcgtgacattgagactttctacaatactacagtggaggagatgcccatgaatgtggctgaccttatttaattcctgggatgagagttttggatgcagtgctcgctgttgctgaataggcgatcacaacgtgcattgtgcttctttctttgggaatatttgaatcttgtctcaatgctcataacggatcagaaatacagattttgatagcagagcgacgttagtcgtgagctcttgtgaggaaagtcattggctttatcctctttanagttagactgttggggtgggnataaaagatggggtctgtaaaatctttctttcttagaaatttatttcctagttctgtacaaatggttgtattagatgtctctatcatttaataatatacttgtgggactaaaagatataagtgcctgtataaa

SEQ ID NO: 9164 - DNA, 344 bp, Homo sapiens
aaaggagtgcttatttgcctaaatggctgttgacatacttaatagttttgtatctgattctagtatgctaaagcatttcagtattatgagaatacaatttacacactggatccccttgtacttattctttcagttgtcaaaatgttaccattattgctgggattctaagaaatctctacaaatgcctctgatgacatcagaaacaattggttctaatcctgtgaactctcttgtgaagaaagcatgagactccttcggtttagaagccatatctttcaggtcatccagaggtgcccaagccacaccaacagagaagatagtgattcctgcatcatgtgcagcag

SEQ ID NO: 9165 - DNA, 352 bp, Homo sapiens
  unsure (1): n=A,T,C or G
  unsure (256): n=A,T,C or G
ncctggcaccaggctgcctgtctttggttttacttccttgtcactttttcttaaaagaggtactgagtataaaacaatataaaacaatatgagagggtctctctctcttccctcatttcccccctttgagactctcagtttttattaggtgggagttctgagtcttatttttgctacttatgtctttttgtgcaatagattgatagtgatgtatatagtatgcttctgctaaagcattttggtgaactaaggtcgngacaaagttttttatcatttggagaaatacaggtatcagacaaaggagcagtaagcaggtttctattactattattactcttattataagagtttt

SEQ ID NO: 9166 - DNA, 511 bp, Homo sapiens
  unsure (1): n=A,T,C or G
  unsure (2): n=A,T,C or G
  unsure (214): n=A,T,C or G
  unsure (283): n=A,T,C or G
  unsure (395): n=A,T,C or G
  unsure (417): n=A,T,C or G
  unsure (458): n=A,T,C or G
  unsure (504): n=A,T,C or G
nnaaatcccagtttcagggaacaggactcaggtgggagccacgcctaaaagccttccacagagagagtgtggttaagcgcataggcgtcgctatcctcttcctccaaaagcagcttgtcgatggtcaacgagctggcggctcttctggggtcttccatgtcctgaaggactggctctgggatagagatggggagctggacaaactggggcccangtagggctggggccggaggctggtactgcagggtggaggtgggtagtgtggaaaggggctgaggccacnggaaataggtgaggggtgcccggtgctctgggccctccagcgggggccccactgcgggcgtggcggaccttcttgtctgtgacaggaaaacaccgtgacagagggttagcanccccaggagacccatccacccntccttgcccttagagggggcctccatctcccccttcaattntgcccttttctggtttctcacttcatggggcttcacctcctcctgnttaaaag

SEQ ID NO: 9167 - DNA, 371 bp, Homo sapiens
  unsure (8): n=A,T,C or G
  unsure (39): n=A,T,C or G
  unsure (51): n=A,T,C or G
  unsure (135): n=A,T,C or G
  unsure (176): n=A,T,C or G
  unsure (191): n=A,T,C or G
  unsure (203): n=A,T,C or G
  unsure (209): n=A,T,C or G
  unsure (210): n=A,T,C or G
  unsure (251): n=A,T,C or G
  unsure (254): n=A,T,C or G
  unsure (288): n=A,T,C or G
  unsure (302): n=A,T,C or G
  unsure (333): n=A,T,C or G
  unsure (342): n=A,T,C or G
  unsure (348): n=A,T,C or G
  unsure (367): n=A,T,C or G
aaggaccncgggaaggatatggaggcttcaggggacagngggaaggcagcncaggcttcaggggacagcgggacggaaacagaagattcagaggacagcgggaaggcaccagaggcccgagaggacagcgatcangaggtggcaacaaaagtaacagatcccaaaacaaaggccanaagcggagtttcagnaaagcatttggncaatanntagaaatagaagatttatatagcaaaaagagaatgatgttnggnaatatagaactgaacattatttttcatgcaaagntaaaagcacattgngcctccttttgaccacttgccaagtccctgnctctttcanacacanacaagcttcatttacctcngccg

SEQ ID NO: 9168 - DNA, 425 bp, Homo sapiens
  unsure (1): n=A,T,C or G
  unsure (133): n=A,T,C or G
naaacttctgtttgccagctctgtcttcagtaccaggcacttccttgggacttccttctttgtatgggggcctgataagccactccagacaaggggctgttctttatgacttgggaggaatcagcaattctanaaggagtcattgcctttggtgctttagtttgttctattacttcttttctaggacagagccacatattcagggaatctttatgcttctcagactcaggtttgggttccacaggcatcccatttttatcctttccttctttcttcagaagccacttatacagagcctccttctcacaattctcatcacacacacactctgcaaagcttgtgcagggctcattggctctgcacacctcctctaccttacatgggtcctgatggttctggacaagccaatcctctgtaacacctgc

SEQ ID NO: 9169 - DNA, 330 bp, Homo sapiens
aaaagaggtatgagggctgggcgtggtggcttatgtttgtaatcccagctacttgggaggctgaggttgcagccaagattgcgccactgcactacagcctgggcgacagagcaagactctcaaaaggaggcatgaaatgcacctcaatcttttgccccaagtctgccaaagattgtcaaaccctccctgttaaaaaaaaaatcaagtttacctactctcccttctatataaaggaccctaaaattaaaatgtcaatgcccaaaatgccgaagtgcagatcgtcttctctccaaataagagttacttggaatccttaacaaatccaaggga

SEQ ID NO: 9170 - DNA, 397 bp, Homo sapiens
  unsure (1): n=A,T,C or G
  unsure (2): n=A,T,C or G
  unsure (20): n=A,T,C or G
  unsure (305): n=A,T,C or G
nnaatgatgtgaaagcattngttccattcaaaggcccctatgcctttgaatgacatattctcagtaacttctttgccagtaactagagtatgtgagactgagtaactataatgtgcatatttcaagaattagcttcccgctgcattataacacatttcctaggaaagcctttgtatttttcatagccttttcacatatccctcatttaagaagtcacagtgttgcagttttactttgtttcagaggggaaggccatcttgttggcataagggggacagaagatataatatactctacactccggnctcttccctacaacctaaaagggagaggagttgaggccgatgggctaggactaggctttttggtaggcacattatagaagactgggtaaaga

SEQ ID NO: 9171 - DNA, 354 bp, Homo sapiens
  unsure (60): n=A,T,C or G
  unsure (333): n=A,T,C or G
ctgtttatccaagcttgagctcttgccaagatgtggtttgtgaattccgaactctgtggnctgctctgaaggagctgtcacagatgcctggggtgcttgcagcctgaaatcacacaggccctcccccagtaccaacctatctgcctcgccactgggcccctttcccctctcaggacaggggactaccaagcccaaggacaaagctcctatgtccagagttgacgactttgctgtctctccatcatcttcaacctgatctccgtcatcttcaacctgatctattctttcatcatccgatgcgacttcaggaatggaaggaaggcttaagttcanatcggccatgattggagattt

SEQ ID NO: 9172 - DNA, 271 bp, Homo sapiens
  unsure (1): n=A,T,C or G
  unsure (7): n=A,T,C or G
  unsure (11): n=A,T,C or G
ntgtggnttanctggctttgctggtcgtaatggaggacaaaagtgccttctggtgaaactcagcttccatagtgatggaacctaagggtagcagagtttatggtgaccctgtagtgtatctccagaaatggtgatcgtttgaatgcatgtaagacattccctagggactccaagaaatattgattacaggaagatgtggtgctttgaaagggacttggtgttcctacatgaaccaagtgaaggcctagaattggcaacattcagaacctcg

SEQ ID NO: 9173 - DNA, 342 bp, Homo sapiens
  unsure (1): n=A,T,C or G
naaagaaacagatttcagaattaaaaatcaaaaaccaacaattggatttggaaaatacagaacttagccaaaagaactctcaaaaccaggaaaaactgcaagaacttaatcaacgtctaacagaaatgctatgccagaaggaaaaagagccaggaaacagtgcattggaggaacgggaacaagagaagtttaatctgaaagaagaactggaacgttgtaaagtgcagtcctccactttagcgtcttctctggaggcggagctctctgaagttaaaatacagacccatattgtgcaacaggaaaaccacccttctcaaagatgaactggagaaaatgaaacag

SEQ ID NO: 9174 - DNA, 372 bp, Homo sapiens
  unsure (1): n=A,T,C or G
  unsure (161): n=A,T,C or G
  unsure (163): n=A,T,C or G
  unsure (301): n=A,T,C or G
  unsure (319): n=A,T,C or G
naaaagtttccctagcgggccattccttagcaaaatgttggaatccctgttgctacattgactaaaaggtcatgatgaatggaatatgtaagacttggctcatagaaacctaatcagatggttagaggtgttggcagtttaggacctgctgtcataaatgngngaacaaccttttgtaacctaacctattgacctgcatgttttttctttaccccaattcattacatggaggctcaatcttgagtttgctttactggttcagcaaaagccaggaagaacaactttgtagtaatcaaaatgntatccaactgtatattgnttactttattgtaaatactgaacagtggttaataaatagttatatatttcttt

SEQ ID NO: 9175 - DNA, 354 bp, Homo sapiens
ctgaggcagacacccctttccggatctgaaacccagggcagcgctggatggagtcagtgtgccccactgcccccctgctcaccagcagtgcagcagggaccaggtcagtctaatcatcttaagccccgaattcagcacagagcccagaaccccctggggctcagaacctactggctaagatggacacgccttccccaggcttacccggtaaaggccagcagggacgtgcactgaatagatggcgtcgtcctctagctcagtgctgtggaaaggctgcagccgcgtagtgagctcgtccccaggggggcccccaaagggcttcagggcaagagccaggttcatacatggaaaagg

SEQ ID NO: 9176 - DNA, 338 bp, Homo sapiens
aaaagaaataaccatttgtttcagattaaattgaccattctatttttcagtcagcattctcaccaccaaatggcacctatcccctttaccctgtgttccttttgctttttgccgtaactcttattgtcctccaataaactgtgtaatctatcatatccatctccccttgctagaatataagctccatgagggtgggataatttggttttttgctcaataacaattgtcccatttatgtctttatcttttaagactattcatcttcaaataagacataaataaggttttattatagcaatatgctataatttttaagtgacaactcaagcacttgtttt

SEQ ID NO: 9177 - DNA, 461 bp, Homo sapiens
  unsure (130): n=A,T,C or G
  unsure (216): n=A,T,C or G
  unsure (246): n=A,T,C or G
  unsure (251): n=A,T,C or G
  unsure (252): n=A,T,C or G
  unsure (284): n=A,T,C or G
  unsure (371): n=A,T,C or G
  unsure (375): n=A,T,C or G
  unsure (403): n=A,T,C or G
  unsure (435): n=A,T,C or G
  unsure (443): n=A,T,C or G
  unsure (446): n=A,T,C or G
tgcaaatccatgtctaaggtgcatggttgtgttcacttaacaattacgcaccttgactgtccaaatgtgagagtcttatggagtgggcactccctgctggaagggaaaggtgagactgaggtatgtgganaggaccctccttttctagtgcataggatcccagacgattataatcacacacaacatgccaagaaaaggggactgcgttatcagcancccttctgtatactgcaaatggagggtganaaggnngaactttgtttaattaggatgaaccatgtggngattacatacattaatgtccaagggacattgttgtggtcaattaaaaccatgtactttggacaaatataagaatcttaaaaagtagngggnactccttgttgaaaaagcaaaagggagnccatgagaaggtgcccttatctagtacacaangaatatanacnagccaagcaaagagg

SEQ ID NO: 9178 - DNA, 357 bp, Homo sapiens
  unsure (10): n=A,T,C or G
  unsure (200): n=A,T,C or G
aaaagcttgncagagttgcacaaatctaactggtattttgtttttgtttttaggaggagatgttaaggtaacccatcttgcaggacgacattgaagattggtcttctgttgatctaagatgattattttgtaaaagactttctagtgtacaagacaccattgtgtccaactgtatatagctgccaattagttttctttgnttttactttgtcctttgctatctgtgttatgactcaatgtggatttgtttatacacattttatttgtatcatttcatgttaaacctcaaataaatgcttccttatgtgattgcttttctgcgtcaggtactacatagctctgtaaaaaatgtaattt

SEQ ID NO: 9179 - DNA, 435 bp, Homo sapiens
  unsure (1): n=A,T,C or G
nctgaggaatgacgcaggggcctgcaggcagctcacgcggagacaggtctgtggggccccgcgtcagaacccacttcacatcccaaagccccacctgctttgatcttcaatgctgggctcaatgtcagatctggctgaccagaggggctcaatgaggctcactggctcttcatgcaccctgctgtggcctgagcacgtccccccaaaacccacctgcttaagtcctcacctgcaaggggatggtattaggtggggcatttgggaggtcatccggtcacagggcaggggcacagcctcatcatgggaccatcaccctcacaaaagaggttgcatctactggtgctttcatcttgggcttccagcctccaaaactgaaactgatttctgttgtttataagccactaggtttacaatattttcttttttttttttgaa

SEQ ID NO: 9180 - DNA, 218 bp, Homo sapiens
  unsure (57): n=A,T,C or G
  unsure (103): n=A,T,C or G
  unsure (122): n=A,T,C or G
  unsure (157): n=A,T,C or G
  unsure (177): n=A,T,C or G
  unsure (214): n=A,T,C or G
ccaaagtgggcagattgcttgcgctctggagctcgagaccagcctgggcaacatggngaaaccctgtctctaccaaggatgcaaaaaaaaagctgggcatggngggtgcatgcttgtcccanctactgaggaggctgaggtgggaggatcccttgancctgggaggtggagggtgcngtgagctgaaatggcaccactgcaatccaaggggggngaca

SEQ ID NO: 9181 - DNA, 157 bp, Homo sapiens
  unsure (24): n=A,T,C or G
  unsure (42): n=A,T,C or G
  unsure (48): n=A,T,C or G
  unsure (58): n=A,T,C or G
  unsure (64): n=A,T,C or G
  unsure (68): n=A,T,C or G
  unsure (88): n=A,T,C or G
  unsure (90): n=A,T,C or G
  unsure (102): n=A,T,C or G
  unsure (115): n=A,T,C or G
  unsure (120): n=A,T,C or G
  unsure (124): n=A,T,C or G
  unsure (125): n=A,T,C or G
  unsure (141): n=A,T,C or G
  unsure (142): n=A,T,C or G
caacctttttcgcgtacctggggnggaaactgctggcccaancaaatnactttgagcnatactnatgnagagggaccatcttaagggntntactgtcctgcnctaagacatggangggancagnngggccatcatcaaagnnttttactccatcttg

SEQ ID NO: 9182 - DNA, 167 bp, Homo sapiens
  unsure (39): n=A,T,C or G
  unsure (45): n=A,T,C or G
  unsure (52): n=A,T,C or G
  unsure (59): n=A,T,C or G
  unsure (84): n=A,T,C or G
  unsure (100): n=A,T,C or G
  unsure (110): n=A,T,C or G
  unsure (162): n=A,T,C or G
  unsure (163): n=A,T,C or G
aaaaacaaactacataaacagatctttcctataacctangaaagnggaatgncagaagncaacaaaatgtgataaacttaaagngctaaaacagaaggcncttcacaaantctgttcactgaaacagttatatatcctcgcttacatccttcactttacaannggca

SEQ ID NO: 9183 - DNA, 224 bp, Homo sapiens
aaaatttatcagtatagcatttcatttctatgcatgtatatgtatagtaattcataaaactaaatagcaaactgatattctacaccagttcatttatctcaatatatattttggaatataacggcaatattaaaaatatcaattccctctaagctgataatactataagattttacacaaagttaaagtttttgttttttctttttgaaaaagtttcattgttt

SEQ ID NO: 9184 - DNA, 345 bp, Homo sapiens
  unsure (1): n=A,T,C or G
  unsure (31): n=A,T,C or G
  unsure (36): n=A,T,C or G
  unsure (39): n=A,T,C or G
  unsure (58): n=A,T,C or G
  unsure (64): n=A,T,C or G
  unsure (69): n=A,T,C or G
  unsure (153): n=A,T,C or G
  unsure (186): n=A,T,C or G
  unsure (241): n=A,T,C or G
  unsure (250): n=A,T,C or G
  unsure (251): n=A,T,C or G
  unsure (293): n=A,T,C or G
  unsure (317): n=A,T,C or G
  unsure (319): n=A,T,C or G
  unsure (335): n=A,T,C or G
naaaaatatgtactgtttccttttttgttgnttttntgnctgttattttttcttttgncctganctcancatagactaatactaccttaatgttaaaatctgaatttcttttaccattttgcttaaaagcaatatgctatttgcttattccgngccctgacatagataatttttgaattctgatanaatacaagtgtggtaaatgccatgtttgtactttatctaacatcttctctttcancaggcttgnnttttttatatcatgagattgtttgtgtgtcccctttcctctnctttgcttaacacaattatcttgngntgaaggatcctccacnatttcatgga

SEQ ID NO: 9185 - DNA, 306 bp, Homo sapiens
  unsure (149): n=A,T,C or G
  unsure (255): n=A,T,C or G
  unsure (267): n=A,T,C or G
  unsure (270): n=A,T,C or G
  unsure (272): n=A,T,C or G
  unsure (288): n=A,T,C or G
aaactaagcaaaggtacacgttgtaacggtggggcatctgtgaaaaagatgtccctttcataatatatgcaatatattccagatgttttgagagattacagaagaggaggcctgcttcacttgcagataagtttattataattctccanaaatgtgcaggatgtgcattagcaaattgcactgtacttttcactccagcctgggtgacagagcaagactcccgtctcgggggcttaaaaaaaaaaaaatgctgtntctaaatgaatntgngnaattgggcccaaatgngggtttgctcagtattag

SEQ ID NO: 9186 - DNA, 189 bp, Homo sapiens
  unsure (126): n=A,T,C or G
  unsure (164): n=A,T,C or G
ggaaagtgtaaatttatttaataccaaatgtttcctaagtttactttttgcacaatgcacagacacttttgggacaatgtatggttaaaaactaatattctaccaacagctccatgctgctctagnatcatcctgaagggacaaaagtaatggcagaaggatgnctggggtctccaaagtcccaggaac

SEQ ID NO: 9187 - DNA, 257 bp, Homo sapiens
  unsure (55): n=A,T,C or G
  unsure (75): n=A,T,C or G
  unsure (142): n=A,T,C or G
  unsure (207): n=A,T,C or G
  unsure (234): n=A,T,C or G
ctgagaattaactactgacagtatccagcacttctggaacacgcggtacagcctntttggctaatagttctgcanaattgaagtctggctcataagtgacactcttagaggagctgcaggaacagctacaggtttctgtganatcattaaaatctccaagctctaaaataacaaattcatcaacatcgcatttgcagaatctctttnacatcatggcaaggacgtgtttcagtnactgggctgacctgtaacacagc

SEQ ID NO: 9188 - DNA, 295 bp, Homo sapiens
  unsure (126): n=A,T,C or G
ctgcacgggggaggtgaagcagaaactcgctgagcctcaaggaatgtgaaactagcaagtacagataaggctcaaatgtattacatgaatcattatcaatctgtcttgcaggaagacctaggtagngaagatgaaagtgagaactcccactaataagtgagattctcaaaggggggaatgaggaaggagaccacctctcttattgtttcatacctcagaaaaagaaggaagaaataaaagttaaagaaggcaaaaatgagataaatagtcaggcagcctggccccgcaccccagg

SEQ ID NO: 9189 - DNA, 225 bp, Homo sapiens
  unsure (1): n=A,T,C or G
  unsure (133): n=A,T,C or G
  unsure (197): n=A,T,C or G
  unsure (203): n=A,T,C or G
nggtaaaatcatttatataaagtcattaggatcatttaggaaagagaggatggaaactaacatttattaaaaactaactataccaggtaccttattacattattttatttaatcatcatgtatccctataagnaagtattcttctcttttatagcagtaaggaaatctgagcatgtcaggcaatatctaatgttgcnccaggnatcatccgcaagctgggcaatg

SEQ ID NO: 9190 - DNA, 373 bp, Homo sapiens
  unsure (13): n=A,T,C or G
  unsure (19): n=A,T,C or G
  unsure (123): n=A,T,C or G
  unsure (124): n=A,T,C or G
  unsure (135): n=A,T,C or G
  unsure (144): n=A,T,C or G
  unsure (148): n=A,T,C or G
  unsure (248): n=A,T,C or G
  unsure (328): n=A,T,C or G
  unsure (340): n=A,T,C or G
  unsure (345): n=A,T,C or G
  unsure (350): n=A,T,C or G
aaataaaattacnagctgnaaggaaaatgaaaagccacaaatgcaagactgttcttaaatggaaggcatagtcagcgagggtaaatcctataccactttaggaagtattaaaaatatttttannatttgaaatanatttcatanaagncctctattcaaaatcatattccacagatgttccccttcaaagggaaaacatttggggttctaaacagttatgaaagtaagtgatttttacatgattccanaataacacttgtattgaccaatttagacagataccacgaccaattttgcatttaagaaattgttctgattatttacgtcnactcattagaantcagngaaangtcacagtcttttgtcacagaga

SEQ ID NO: 9191 - DNA, 271 bp, Homo sapiens
aaacaaataaaaggtcttggggaattctgtttggctacctgggcacgccagtctgcaccatgtgtccctgcggcgcatgagtgactggcgtatttagcccgtcacatttcattcgctgaaggaaaggcaagagagttgaaacatttttcttacttaaaaaaaatgatctttgtgaagaacatagtgagttcgtttgtcttcagtcaacagcggctgaaactgaccactgagaaatgggtgtgggcactgacagttctcccccattatttgg

SEQ ID NO: 9192 - DNA, 477 bp, Homo sapiens
  unsure (344): n=A,T,C or G
  unsure (374): n=A,T,C or G
  unsure (401): n=A,T,C or G
  unsure (421): n=A,T,C or G
  unsure (440): n=A,T,C or G
  unsure (454): n=A,T,C or G
  unsure (464): n=A,T,C or G
  unsure (475): n=A,T,C or G
aaagtgatcaggttcattttattgactacacagaagcaattccattttccactaacaaaataatttaggatgaagaattctgactcagtgtctccacaggaacctgttcctcagctttctggatgtcattgtttctgacatcacaccttcctagacaggtatttctggaaaaggatctggtaagaggatgaatttggctctaaacaaatgcccatggccccggaagacctgttggggccaccgagttagtttctctggcaaaatttgattccttccatctcaccactatagtaactgttgttgttatgttaccaggagccacacaaaggttgacccatcaaggnggagccaccgttaccaggagccacacgaangcttgaaccagcaaagtggaggaccanacctgcccgggccggcgcgntcaagggccgaaattccangcacactggcgggncgttactagnggatcccgagntc

SEQ ID NO: 9193 - DNA, 262 bp, Homo sapiens
  unsure (176): n=A,T,C or G
  unsure (190): n=A,T,C or G
  unsure (198): n=A,T,C or G
  unsure (209): n=A,T,C or G
  unsure (222): n=A,T,C or G
  unsure (246): n=A,T,C or G
  unsure (260): n=A,T,C or G
ggggaaatggcattcttggcaaagagaacagcatgtgcagaccaggagcaggagcaaggaggggctgacagatggtggcactagggacgttggcagggtcagactgtgccagccttgaaggccaggggagaccctgggactgtggcgtggtcatgggaaaccaccactgacagttntggagcaagggcangatttggntttaggaaacncactttctctggnaagacctacaggtttaacggtccntccttcctcattgnaa

SEQ ID NO: 9194 - DNA, 146 bp, Homo sapiens
  unsure (2): n=A,T,C or G
  unsure (15): n=A,T,C or G
  unsure (24): n=A,T,C or G
  unsure (56): n=A,T,C or G
  unsure (72): n=A,T,C or G
  unsure (75): n=A,T,C or G
  unsure (79): n=A,T,C or G
  unsure (83): n=A,T,C or G
  unsure (96): n=A,T,C or G
  unsure (101): n=A,T,C or G
  unsure (113): n=A,T,C or G
  unsure (115): n=A,T,C or G
  unsure (117): n=A,T,C or G
  unsure (145): n=A,T,C or G
gnaacacccaacagnaacctctgntgttactctttgactaaaataattattttagntaaaaaaaaaaaaaanaanaaanaaanaaaccaggtaacnctatncaaaaggaagcngngnaagatctgaaacaaaattttctcttttnc

SEQ ID NO: 9195 - DNA, 347 bp, Homo sapiens
  unsure (1): n=A,T,C or G
nggtctggtctccctccaccctctcatatttacacccaaccccttccccaaagctagcttttaccaaagttcctggtaggaggtcaagaagtgtgtccacttagccagcagtcctagatgtagtggacgctgtttgtccccaggccagttgggcaccaggaggggctactctggggattcagggcatagacttcgtactggggtcaagggaggcccccactcacagatactctcctttccttctggggctcaatgtacaccaaaaccttcagaaagcaaagttggagtggtggacccccaatgtcaagtttagtgctctctttgcttgtgaggacccacacaagtgg

SEQ ID NO: 9196 - DNA, 364 bp, Homo sapiens
  unsure (1): n=A,T,C or G
  unsure (5): n=A,T,C or G
  unsure (302): n=A,T,C or G
  unsure (336): n=A,T,C or G
  unsure (341): n=A,T,C or G
ntgancgtgaagcacaccccgaagttggagatcaaggtcactcccagtgatgccatagtgagggagggggactctgtgaccatgacctgcgaggtcagcagcagcaacccggagtacacgacggtatcctggctcaaggatgggacctcgctgaagaagcagaatacattcacgctaaacctgcgcgaagtgaccaaggaccagagtgggaagtactgctgtcaggtctccaatgacgtgggcccgggaaggtcggaagaagtgttcctgcaagtgcagtatgccccggaaccttccacggntcagatcctccactcaccggctgtggagggaagncaagncgagtttctttgcatgtcactgg

SEQ ID NO: 9197 - DNA, 373 bp, Homo sapiens
  unsure (6): n=A,T,C or G
ctgtancttctgtgggacttccactgctcaggcgtcaggctcagatagctgctggccgcgtacttgttgttgctttgtttggagggtgtggtggtctccactcccgccttgacggggctgctatctgccttccaggccactgtcacggctcccgggtagaagtcacttatgagacacaccagtgtggccttgttggcttgaagctcctcagaggagggcgggaacagagtgaccgagggggcagccttgggctgacctaggacggccagtttggtccctccgccgaagacgacatggtcattattacgatcccacacttgacagtaatagttggcctcatcgccggcttcgaccctgttgatggtcagggtgg

SEQ ID NO: 9198 - DNA, 364 bp, Homo sapiens
aaggcccttttctccaaaaaattcattccactttcatcttctgaatcggagttggaatcagtcacagaattctctgagggctggcgggactctgcttttttgttggttgctcccctggtactccgcgctggaaacttcatcgccaccctgagaggtccagagtgcctgcactggctgcgggtcctacagccttcccgaactgactgcagcctcgtgtttgcaaaattatcagaagcaaagctgtcacaactgtcatcagaggatgacgaggtttccatggaaatcaacttcacatatctgaatttctttaagttcttctttactctgagatctttctgcggcacgcggcgagcgtccatgctgg

SEQ ID NO: 9199 - DNA, 273 bp, Homo sapiens
aaaaatctctctcgtgggtaaagtcactttccccttggcatctgacttcagcaccatctgggccctacagaaactgaggccagtggaggaaatggctctggacaaagggctgctgcttggatgtggccccagcgatggtcagtctgagatcgacactcctagagtccaccaatctctctctggaggcttctgaggttgatccccatactccccacaccaggtctacaactccataataatggctaaaaattatttcttatttatttgaaattt

SEQ ID NO: 9200 - DNA, 126 bp, Homo sapiens
  unsure (34): n=A,T,C or G
  unsure (36): n=A,T,C or G
  unsure (44): n=A,T,C or G
  unsure (48): n=A,T,C or G
  unsure (59): n=A,T,C or G
  unsure (78): n=A,T,C or G
  unsure (92): n=A,T,C or G
  unsure (98): n=A,T,C or G
  unsure (106): n=A,T,C or G
  unsure (112): n=A,T,C or G
ctgtagcttctgtgggacttccactgctcaggcntnaggctcanatanctgctggccgngtacttgttgttgctttgnttggagggtgtggnggtctncactcccnccttgncggggctgctatct

SEQ ID NO: 9201 - DNA, 415 bp, Homo sapiens
cctcatccggctttgacccaccatccgttgcagaagcctccaggagcagcaatcctaagagtgggaggcagccaagacccccttccttcaaaacctcccggaagtggtttcaggccctctagttgccatgaccaatttgtgtgtgtgtttaatttttgcttcaagctctgtagcaggacctgccccacgcacacccctacccctctgtgaggagctgtgggaagtgtgggtttgtctccagaacagaagagaatgatggatattctggctctggggccctctccaccaccactcacagtagccttgctgaagccatcacagatgggagaaggccatgccagccacgtccgccgaggggcgccagcctgaagctgccaggccctgaggttcagaccctggaccccatagctggagg

SEQ ID NO: 9202 - DNA, 371 bp, Homo sapiens
cctccttgaggatgaggctgattatgtggtccccgtggaagataatgatgaaaactatattcatcccacagaaagcagttcacctccacctgaaaaaggtaagagtttgtcgccttaagcacctgaaaatttttagcagttgatcaggatgtataagagtatttggtagtaagcactaagaggctcagaaatgacagtgcccaggactttctcccctgggccacagtgtgtgcttctttggctggttgggcagacagcatcagtgacaacccatctctgtgtatcatagcccttccctgccttccccttcctcttccatgctttaatcttcccatctcacattatgaaagcacctgggtagttctcttcag

SEQ ID NO: 9203 - DNA, 360 bp, Homo sapiens
ctgatgtcacagtgcagacatccaccgttccaccacagaaccagtggctgagcggaccaacgttgccatgtgcgtttgctctgtggggaacagagcacagagggtgagcgacatgtgcagaacggccccttggctgcagttaggacctcagtggctggtatggccgagctgctagaagatgctgctgtccctgtgatcccagcagccctcccttcaccgtgacccctgacctttgtcaggaaggtgcagtttttcttctcaatctaaatgcctttcaggtgggccgcttccttggctacctggttccagggggctgttttgtaatgagatgctgctggcaggccactcagaggctcccag

SEQ ID NO: 9204 - DNA, 606 bp, Homo sapiens
  unsure (191): n=A,T,C or G
  unsure (524): n=A,T,C or G
  unsure (590): n=A,T,C or G
  unsure (599): n=A,T,C or G
aaattttgagacagtataaggaaaatctggttggtgtcttacaagtgagctgacaccattttttattctgtgtatttagaatgaagtcttgaaaaaaactttataaagacatctttaatcattgcaaaaaaaaaaaaaaaaaaaaaaaaaaaacctgcctgggcggccgcccgggcaggtccttgcctcanatccaaggtcactcggaagaggccatgcctaccctcaatgacactcatggaggaaatgctgagagaagcattcagatgcatgacacaaggtaagactgccaaaaatcttgttcttgctctcctcattttgttatttgttttatttttaggagttttgagagcaaaatgacaacacccagaaattcagtaaatgggactttcccggcagagccaatgaaaggccctattgctatgcaatctggtccaaaaccactcttcaggaggatgtcttcactggtgggccccacgcaaagcttcttcatgagggaatctaagactttgggggctgtccanattatgaatgggctcttccacattgccctggggggtcttctgatgatcccagcagggatctatgcncccatctgngtgactg

SEQ ID NO: 9205 - DNA, 216 bp, Homo sapiens; identical to SEQ ID NO: 3766

SEQ ID NO: 9206 - DNA, 367 bp, Homo sapiens; identical to SEQ ID NO: 144

SEQ ID NO: 9207 - DNA, 408 bp, Homo sapiens
aaattggaaaattgaaatcccaagtgggcaagcaagggctccagcctagcactcccttttctctcccacatagcatgagggagagtggaaaggtaggagtgggtgggaaagtgttgcacccagcctttccactccaaacctcgtattgctttcttgaggttggtggtgaccaggatgtatcattttaggtcatgtccaaagtaatggagatgttccagcctagtgcggtggtcttacagtgtggctcagactccctatctggggatcggttaggttgcttcaatctaactatcaaaggacacgccaagtgtgtggaatttgtcaagagctttaacctgcctatgctgatgctgggaggcggtggttacaccattcgtaacgttgcccggtgctggacatatgagacag

SEQ ID NO: 9208 - DNA, 248 bp, Homo sapiens
ccaaagaagcagcggcttgggccttcacccagtgggcccttctctgtgatatagtcaaagagatcctgggcgggcaaaggccgctcgaggaccagcatgaagccctcctgtgtctcaaaccagtcaagcaggcggatcacgccagggtgcccaccacctgcacccactttccatagcagtgcgacttcgagtgggcatgtgactgagtctgacaagggggaccagcccagcacacgattccggggaat

SEQ ID NO: 9209 - DNA, 90 bp, Homo sapiens; identical to SEQ ID NO: 145
  unsure (8): n=A,T,C or G
  unsure (53): n=A,T,C or G
  unsure (54): n=A,T,C or G
  unsure (85): n=A,T,C or G
  unsure (86): n=A,T,C or G

SEQ ID NO: 9210 - DNA, 343 bp, Homo sapiens
  unsure (243): n=A,T,C or G
ctgtggatcctgattctggactggaacactctgcgcatgtcctggagaaaggtgggaaggtcttcagtgccacccttggcctggtggacatcgttaaaggaaccaactcctactacaagctgcagcttctggaggacgacaaggaaaacaggtattggatattcaggtcctggggccgtgtgggtacggtgatcggtagcaacaaactggaacagatgccgtccaaggaggatgccattgagnacttcatgaaattatatgaagaaaaaaccgggaacgcttggcactccaaaaatttcacgaagtatcccaaaaagttctaccccctggagattgactatgg

SEQ ID NO: 9211 - DNA, 291 bp, Homo sapiens; identical to SEQ ID NO: 146

SEQ ID NO: 9212 - DNA, 197 bp, Homo sapiens
ccattggttcccatgacaacgtgatctacatctatggtgtttccagtgatggtgccaaatccagccgctttggccgctgtatgggtcactccagcttcatcactcatcttgactggtccaaggatgggaatttcatcatgtccaattctggggactatgagattctttactgggacgtggctggaggctgcaagcag

SEQ ID NO: 9213 - DNA, 244 bp, Homo sapiens; identical to SEQ ID NO: 147

SEQ ID NO: 9214 - DNA, 91 bp, Homo sapiens
ccagtgaggaccggaggagccctgggggccagggagaccacggtcgcccttctcaccctgttcacccggaggaccgatgagcccgatcagg

SEQ ID NO: 9215 - DNA, 157 bp, Homo sapiens
ccacgctgctggcctgggctggcgtctcctgctgtgagctggctgaggaggacttcctggcggtctcccccttagatccgcgctatcgtgaggtccactatgtcctgctggatccttcctgcagtggctcgggtgagatggtatgccgagcagacag

SEQ ID NO: 9216 - DNA, 406 bp, Homo sapiens
cctctaaccttgagagtgtcattgccttgttacatagcatgatgtcttaccccagaagaaaaacagggaaatatagaaactcctaccctcccacatgcacagatttctgggtgatgcctccccaaggagtagagatagaagaagcagcaaagacaagggcagagacccagcaccactatgccacacacttgatgtcagataccaccaggaaagggaaaaatcacattccaaattacaaaggaaatggaaagatggaagaccgaagacacagattttgctgcagcaattccttggaacgtgagagcactctcttcgaaacctcttctctcattctctttggaagcccaaactgggttcttgagtttggggaagatttatggaacagatgatgcctaccattgccttt

SEQ ID NO: 9217 - DNA, 166 bp, Homo sapiens
cctggacgaggaaggctcctgacactcactaggactgtgactagatgttccagtggcagaaagtcctcctggtttccttcgggccctggcgtaatgcagcagagcagcagcagcagcaaggacgaggatgctgagcaccagccccgtgattcccgcagcggtaagg

SEQ ID NO: 9218 - DNA, 126 bp, Homo sapiens
cctcctcctttcgctcctgaagtcagaagcgccagcctttggctctcaaaattgggagcgatttggtggagaggatggggtagggaggatgggagaacagcgcctttatctgggacagacagaagg

SEQ ID NO: 9219 - DNA, 322 bp, Homo sapiens
  unsure (182): n=A,T,C or G
gatcgcgccaccacactccagcctgggcgacagagcgagactccatctcaaaaaaaaaaaaaaaatactgagtagcaaattcttaattccaagtaaagattaacacctttctattaaaaaaaaaaaaagatgaggagagaataaactatttcctattattattctagctgggtacacaggcntgcacttgtagtcccagttactgaggaggttgaagggggaggattgcttgagtctcggaagtcaaggctacagtgagctgtgatcatgtcactatactccagcctgggtgaaagagtgagatactgtctccaaaaaaaac

SEQ ID NO: 9220 - DNA, 291 bp, Homo sapiens
ccttcacaacctacgaaactacagtccagatttgggaaagcagccgaaaaaggtgcctaaacgtcgccaggccgcccgagagctgtccattcagcgccgttctgccctcaatgtgaggctcttcctcagagacttctgctctgagttcctggagaactgttacaaccggctcatgggatcagtagaggatcacctgcttcgggagaaagctcagcagcatgatgagacctattatatgtgggccttggctttcttcatggccttcaaccgagctgcctccttccggccagg

SEQ ID NO: 9221 - DNA, 340 bp, Homo sapiens
ctgccagactattcccacagtgctccaaatgcacatgaacaacagtgacggctccagccttcgacccagagccccgtgcccagtgcgtcagtgggcctggggttccaggctacatcaagcactgatggtgtcagggctggtagttaccaaatcagggttaagaaacatcagggccacatttcactaccttcacagatcaaactcagcagcagtcatgactgtctgtcactacactggggatcccaattccacataagcacttttggaagaaaacagccaaagttggcctaaaattggcgctggaatttgggctgggaaaaatcttgtggttatttccttt

SEQ ID NO: 9222 - DNA, 205 bp, Homo sapiens
  unsure (64): n=A,T,C or G
  unsure (188): n=A,T,C or G
  unsure (190): n=A,T,C or G
  unsure (192): n=A,T,C or G
ctgatgcctcactactagatgcagtgctgggaccttcctcttttggagctgtcccatgtacagnggacccaagctcaggaccttcgtggagctgcttctccaacctgagaaactcaagacccatcctcccgctgtcactttggacaatggaaatctacattttcttttcccttttttttttttttganananagtctcgccctgt

SEQ ID NO: 9223 - DNA, 221 bp, Homo sapiens
ctggacttgtttgacgatgttggtactttcgcctctggacccccaaagtacaaggacaatcccttttccttaggggaaagctttggctcccgctgggatacagatgctgcctggggtatggacagggtagaggagaaggagccagaagtgaccatctcaagcatccggcctatttcagaaagagccacaaaccggagggaagtggagagccggagctcagg

SEQ ID NO: 9224 - DNA, 473 bp, Homo sapiens
ctgcagagcccaccccaggaggagcctgcctctccttacaaaggctgtaataagacagcacttgacgatgccatacgtgcgaaaagtgcagagcctcagagggtttacaacccccatccctttgtaactgtagtttgcttacactgtggattctaaagagacatgtaaatctggggccgatttcatctgtttaatgattactccccacccgatagagctattctatactgttgctaaaatttcattaagtctctcaagatgcattgatgagatgagacaccatgaataacacattcatcaactcaagtatggcaactgttcagagagcttcagagctttggtacccgagtgcagacttggtaattaccgggaatttgtctcccccgtataaattctggcgaacaacgagaaaacaccatctgtgatcgtttccacatcacgtttgctaacagagcacttctggagagcaatgg

SEQ ID NO: 9225 - DNA, 252 bp, Homo sapiens; identical to SEQ ID NO: 2678

SEQ ID NO: 9226 - DNA, 360 bp, Homo sapiens
ccttcggtccaattcaggccaccctctgttttcttggctcttgaggcttttgttggtttcaggcctgaggcttctatctatcttggaacatgggctttccatcttagtcctcgggtctcaagtctcaaaccatctgtcttatactttgggcctcctatccatatgagccttccaccttctgccctacttgagttctgggttttactgcagtctagggccttgttttggtcttggatcatctcacatggcagcctggcataaggaaccgctccacaatgcttgctctgatagccgacgttctgcacctatcaggcaggggttaggaagcccctctgccacacatgacacacacacacgtac

SEQ ID NO: 9227 - DNA, 302 bp, Homo sapiens
  unsure (193): n=A,T,C or G
ctccaacccttggaataatccgagtgctccatcttcagtgccatctggactcccaccaagtgcaacaccctccactgtgccttttggaccagcaccaacaggaatgtatccctccgtgcctcccaccggaccacctccaggacccccagcaccctttcctccttccggaccatcatgtcccccacctggtggnccttatccagccccaactgtgccgggccctggccccacagggccatatcctacaccaaatatgccctttccagagctacccagaccatatggtgcacccacagatccag

SEQ ID NO: 9228 - DNA, 311 bp, Homo sapiens
ctgaatatggaagagatctttttttactagagatctgcagaagaaacgcaatcttctgagcacaatatggaatctaaaggttttatcacttagttgttcatattatgaacctaaaaataatggcataaagtttggggatgccaggcatactttttcatgtttggtgttgagttattttacttttctaacccaacattccttggtgagaccattaaatccaaacacttgtcaccgttccttctcatagtcactctgggtcatcagcatgtcccagtcactgcagcaacgccttgtgtttgtttcattttttt

SEQ ID NO: 9229 - DNA, 228 bp, Homo sapiens; identical to SEQ ID NO: 329

SEQ ID NO: 9230 - DNA, 377 bp, Homo sapiens
aaaacaagcaaattttattaaaggaaaattttgcaggtttaaggtttgcaggtgaaattttgtaggtgaaaaggtttacttttcaccagtctgttctggcatgcttctaatgatgtcagagtcacctggatcaatgatagccagtgtgcacactctgtagtattttccgcatgctgtgcccagttcaatattattgccactgtagtgatggacaccagttttagccaacatagcatagtactctatttcagatttcctcaaagctgggcagttgttagcgagaatgaccaatttcgctttgccttgtctgatcatcttcagagtctgcttgtaccccaggacgtacttcccacttttcataacgagttggagcctag

SEQ ID NO: 9231 - DNA, 162 bp, Homo sapiens
  unsure (9): n=A,T,C or G
  unsure (75): n=A,T,C or G
  unsure (77): n=A,T,C or G
  unsure (93): n=A,T,C or G
  unsure (95): n=A,T,C or G
  unsure (155): n=A,T,C or G
ctgggaacncacatgctatgtatgtcaccatgtgatcacaaccacagcacatgtgaagtgctacaattactcctnanagcggtggaatggcanangagcttgcatgaaaaatcagaacatacccgtacaccaaagcaattcaaaaggaccaagtnaccctca

SEQ ID NO: 9232 - DNA, 433 bp, Homo sapiens
cctggaagctcctacccaaccctcatttgtttcaactcactttcaatatgtgcatagttttataaagcagacatttccatgaggaaaagaggatggtggtgaaaggggaggggtgaagggacatctccaagtcacagaggctgcaaaactcagcatgacttgtggacggagccacaggccacccagggcaacaacacccacataactcaccaagtggttaacggctctaaaccagggtcaacaggagaggggacaaaagtcactccttgattttgctgcagcttaaagataagttctacctcagcttatgctagcccttatggggcaaaaaagggaaagtcattctccccaagtccaggctgggccgtcaaacagggagtggggtgtcagccccagacctcaatgaggtccccagattccatgcccaggtcag

SEQ ID NO: 9233 - DNA, 549 bp, Homo sapiens
ctggagcctgagtccgctgcacggagactctggtgtgggtcttgacgaggtggtcagtgaactcctgatagggagacttggtgaatacagtctccttccagaggtcgggggtcaggtagctgtgggtcttagaaatggcatcaaaggtggccttggctgcaaaacaaaagaaccccaggagggtcagtggcgtgcttgaggcaagtcccccaacccaaaaattgtcgcactcctaggaacagagaggccattctgggcgggtctgtcgtgcattaggagagcctttctctgcctccctgaaaacacgccaagcacacactggacccgtgtggttaagcggagctgagagaccatggctatgccccatgtgtggaccacctaccgaagttgcccagggtggcagtgcagccccgggctgaggtgtagcagtcatcgataccagccatcatgagcagcttcttaggcacaggtgcggagacgatgccagtgcccctgggtgcagggatgaggcgtaccagcacagagccgcagcggcctgtcaccttgcaa

SEQ ID NO: 9234 - DNA, 561 bp, Homo sapiens
aaatcctattatcaaaatttgggggggtgatgattaagtaaggtaatgtatataaacatgtagtgcagtgtctggcacatagtaaacaaattttttattgacagatattataacataaataagttttacctgatggccttccttgataatctattcgctctcctcgccagtactccaaaggtttcaaacgtgttctcttggtcctgcgaacatttggtgtgttggagggcaatactagtttgtgatggattctgttctttggtatcactttagattgttttgagtcatctgaacttccatgaacttcctcatcatccacatcattctttccagacattaaataattattattgagcctggaaggtccactttcctctaaaactgaagtcttatgctctccagaatccaagtttgactctgttggtatattacatgtatatccactggtctgaggctttaggggaacattctgtgcagtcataatgttatcttcattctttgagcttcttgtagatctagaacaatcaagatttttcttcttagccaagtctgcctcatcac

SEQ ID NO: 9235 - DNA, 58 bp, Homo sapiens
aatcaataaagcttgccttaaattatttttatatgactgttggtctctaggtagcctt

SEQ ID NO: 9236 - DNA, 254 bp, Homo sapiens
atcaaacaaaagtcactgaggaagaaaataagggttcaggtacaggtgcagccggtgcctcagacacaacaataaaacccaatcctgaaaacactgggcccacattagaatgggataactatgatttaagggaagatgctttggatgataatgttagtagtagctcagtacatgattctccgttggcaagtagccctgtgagaaaaaatattttccgctttgatgagtcaacaacaggatttaacttcagtttt

SEQ ID NO: 9237 - DNA, 291 bp, Homo sapiens
ctgcttttatacccccttgccccgccaacgtagttaagagaacagcagcataagcggctggcagaggcaaggaaagaccagtagagagaaaaaaaggccatctataccaattctaagttaatttagactaaacaaggtcttaatagcaaaggataattgaaatcccaaacttacaaggttttcaacaaaagtgaagtttgcttaaagttaacagtgtaacatgtattatggtaacttctaatcttgtggccttagacagtctagtccaaaggcataaagaaagtttgcttt

SEQ ID NO: 9238 - DNA, 513 bp, Homo sapiens; identical to SEQ ID NO: 148

SEQ ID NO: 9239 - DNA, 319 bp, Homo sapiens
cctgcctgctgtagtttatttcttttgccttgttcagtgaatttacccagagggtggctgagattgaggctttgggagccccaagaagctgcttggttttaatgtgctaccttatagctgagcctgttgtgctcagggcaagtagtaggatgttccccctgggatgtgcaaggttctctcaagcagacatgagcctccatcactcccaccactccctgcaactcagcctcctcttctcagcctgtgccttcctccagttctagtaaacactgccaaatgaatatagttctccgactcttctctgggggttcattggcag

SEQ ID NO: 9240 - DNA, 216 bp, Homo sapiens
cctgtgtgtcctgctcagccactctgtcgaccacactgacccaggggctgccccggacatagaagcggaggggtttccgggcccactcccctgcatggccgacgcccacccgggctgctgccactacagccggctcactgggctccaggggaccacgctccagccatacagcttcatcctgtgccaggtccctctggtcaaagctcttgttgatgg

SEQ ID NO: 9241 - DNA, 223 bp, Homo sapiens
ctgagggtacagctctgagaattggcgctggaaacagttcttggactgtgatagccacaacagatgctgtttctgggatcccaggaccagggctctggaagatgccactgcagtggtagtgcccgctgtctgccttttgtaccacggtgatggagaattccctgttaggcccggggggacccagagctgagccatctcggtagaaggtcacctgagtcagtgg

SEQ ID NO: 9242 - DNA, 359 bp, Homo sapiens
  unsure (37): n=A,T,C or G
  unsure (40): n=A,T,C or G
  unsure (43): n=A,T,C or G
  unsure (90): n=A,T,C or G
  unsure (222): n=A,T,C or G
ctggcttctggcccctgcttcacgcccccagcgccgncgnccnttcctgagtggagatgaggatcccaaggcttccacgctacgtgttgnggtctttggctccgatcggatttcagggaaggtggctcgggcgtacagcaaccttcggcggctggagaacaatcgcccactcctcacacggttcttcaaacttcagttcttctacgtgcctgtgaagcgaantcatgggaccagccctggtgcctgtccaccccctcggagccagacgccctcacccccgacagactcccctaggcacgccagccctggagagctgggcaccaccccatgggaggagagcaccaatgacatctcccact

SEQ ID NO: 9243 - DNA, 306 bp, Homo sapiens
aaaaactggcccttacctgacagagccctggctttgacctgctcagccctgtgtgttaatcctctagtagccaattaactactctggggtggcaggttccagagaatgcagtagaccttttgccactcatctgtgttttacttgagacatgtaaatatgatagggaaggaactgaatttctccattcatatttataaccattctagttttatcttccttggctttaagagtgtgccatggaaagtgataagaaatgaacttctaggctaagcaaaaagatgctggagatatttgatactctcattt

SEQ ID NO: 9244 - DNA, 373 bp, Homo sapiens; identical to SEQ ID NO: 6

SEQ ID NO: 9245 - DNA, 393 bp, Homo sapiens
ccaagactggtggcctggaaatagactcagattttggtggcttccgggtaaatgcagagctacaagcacgctctaacatctgggtggcaggagatgctgcatgcttctacgatataaagttgggaaggaggcgggtagagcaccatgatcacgctgttgtgagtggaagattggctggagaaaatatgactggagctgctaagccgtactggcatcagtcaatgttctggagtgatttgggccccgatgttggctatgaagctattggtcttgtggacagtagtttgcccacagttggtgtttttgcaaaagcaactgcacaagacaaccccaaatctgccacagagcagtcaggaactggtatccgatcagagagtgagacagagtccgagg

SEQ ID NO: 9246 - DNA, 375 bp, Homo sapiens
ccattcccccagccttctccatgacgtaggccatggggttgcattcgtacagcagtctcagctttccattggggctcttcttgttagcggggtacagaaatatccctccgtagaccagagtgcgatgaacatcagccaccatggagcccacataccgggccccataaggagctgaattatctggggggaacttcttcctctggatgtactcattgacggcagggtcaaagtccttggcgtagccctcgttaaggctgtagattttacctttcttttttatcttcacatccttgtccaccaaaatgaactccccgatggcctttttagacaaggaaggaaaggtggagagatgacgagcgcactgggtcccccagg

SEQ ID NO: 9247 - DNA, 268 bp, Homo sapiens
  unsure (185): n=A,T,C or G
gagtgtattcgcatctacgacgtgcacacctgcaagtagggcaccagggcgctgggaaggggtgaagtgtgtggctgggcggattcagcgaagtctcatgggaagcaggacctagagccgggcacagccctcagcgtcagacagcaaggaactgtcaccagccgcacgcgtggtaaatgacccanacccaactcgcctgtggacggggaggctctccctctctctcatcttacatttctcaccctactctggatggtgtgtggttttt

SEQ ID NO: 9248 - DNA, 377 bp, Homo sapiens
ctgtggcgggtgttagagatgtctgacatcgtcctgcttatcactgatatccgacatccagttgtgaatttcccgccagcactttatgagtatgtgactggagaacttggactggccctggtgctggttttgaacaaggtggatctggccccgccagctcttgtggttgcctggaagcattatttccatcaacactatccccagctccacgtcgtccttttcacctcttttcctcgggacccccgcaccccacaggatcctagtagtgtcttgaagaagagtcggaggcgggggagaggatggactcgggccctggggccagagcagttgctgagagcctgtgaagccatcactgtggggaaagtggacttgagcag

SEQ ID NO: 9249 - DNA, 181 bp, Homo sapiens; identical to SEQ ID NO: 149

SEQ ID NO: 9250 - DNA, 329 bp, Homo sapiens
  unsure (250): n=A,T,C or G
  unsure (274): n=A,T,C or G
  unsure (276): n=A,T,C or G
  unsure (280): n=A,T,C or G
ctgcctgagctgtggctccatggagtgggggaactgctccaggggccctggatccaggctcacagtgaaagctgctttgttaccagctcgggcgtagtccatttctgtgtatttcgtgaaccactcattcacctcctcctttgtgcggttggtgaacaggagacccacctcacccctcaaccttttgctgacctggtgcaggttgtctttgtattcatcagatgggctccgacccaaggccaccatcatnaccttgtttttgccaaagaacatncngctntgcttccaggcgttccggatgtccttcagcttgctgttcctcatgttgg

SEQ ID NO: 9251 - DNA, 296 bp, Homo sapiens
ccacgctggaggagccccaggagggcttggagtttgcccacatggccctagcactcagcatcaccctgggggaccggctgaacgagcgcgtggcctaccaccggctggccgccctgcaacaccgactgggccatggcgagctggcagagcacttctacctcaaggccctgtcgctctgcaactcgccgctggagtttgacgaggagaccctctactacgtgaaggtgtacctggtgctcggtgacatcatcttctacgacctgaaggacccgtttgatgcagccgggtactaccag

SEQ ID NO: 9252 - DNA, 310 bp, Homo sapiens
  unsure (301): n=A,T,C or G
aaagaggaagctggcgcgtatggcagccgaggagcacactctgcaggacactggacaagacagtaaatattcaacttttaatgctgattaaaggagtataggtaaagaatacgtaggtatacataattggtgagacaaatattcactttatttatattttatatattatttttttaatttggtaaatactatccagttttgtagttgtccttgttgatttgtgtgatattaaagtattagtaataattgccaggaaactatcattagggagggtttagttggttgctgtttggactggganggatgattt

SEQ ID NO: 9253 - DNA, 521 bp, Homo sapiens
  unsure (376): n=A,T,C or G
  unsure (511): n=A,T,C or G
aaaggtgtgtgtattctgtttgcatctccctgtcactgtgacacacctagatgtgtgttacttcaattaaaattctcaaatttaattttgatttgcttcagaagggaaaatattctcaataatgtaaaataattaaggtctatacatgggttgtatttttctggttcacaacagcacaaagtgtctttcatttttttgttggttttcttttaagatcttttttaccctgaagtcagtgaatacttttctagtttatttgatactctttctgtgtatatattaagcttttgctgtagattgcctagtaaaattactaaggataggttgtttttacatatggtctatttaagtctgatgtttacgggggaaagtgtanttactaaaaatgtttaacataatttggaagaagagtatgaacaaccaataccaatacctattgcgtttggattcttaagaccccagtttgttattccactaaactagttatcttaaccatatcatctggttttgngggccattat

SEQ ID NO: 9254 - DNA, 397 bp, Homo sapiens
aaacattattcactactgtttttgaagtgagaaagtatcagccatttagcatttaagttggggtatttagagcctgtaatctaaatgctggctcaaatttattccccagctacttcttataccactattcttttaatgtttgcataatcataagcacctcaacacttgaatacataatctaaaaattatatagtaaagctggtagccttgaaaatgtcagtgtgatatctattatgtagataaatatatatagtggcctttcaggactgtcacagtaacactttatttacagagctaatgtttgtcctaaattttcaggaccctagaggagagctttatacaattaccgatgtgaatttctctaaagtgtatatttttgtgtccagttatattattt

SEQ ID NO: 9255 - DNA, 255 bp, Homo sapiens
cttgacgaggctgcggtgtctgctgctattctccgagcttcgcaatgccgcctaaggacgacaagaagaagaaggacgctggaaagtcggccaagaaagacaaagacccagtgaacaaatccgggggcaaggccaaaaagaagaagtggtccaaaggcaaagttcgggacaagctcaataacttagtcttgtttgacaaagctacctatgataaactctgtaaggaagttcccaactataaacttataaccccag

SEQ ID NO: 9256 - DNA, 385 bp, Homo sapiens
ctgctgcactgcactttgcgattcaacaagtcagggaagaaaacatcaggaagcagctaaagaagctggactgcgagagagaggagctattggttttccttttcttcttctccttgatgggcctgctgtcgtcacatctgacctcaaatagcaccacagacctgccaaaggctttccacgtttgtgtagcaatcctcgagtgtttagagaagaggaagatatcctggctggcactctttcagttgacagagagtgacctcaggctggggcggctcctcctccgtgtggccccggatcagcacaccaggctgctgcctttcgctttttacagtcttctctcctacttccatgaagacgcggccatcagggaagaggacctcggccg

SEQ ID NO: 9257 - DNA, 529 bp, Homo sapiens
aaaagtttttatttacctaaaaacataaatttatcaaacatatcaatttgctttgcagagcaatttacataaaaattcatgatgtataccaacgacagcatagcattatctacctcagtttgtgaagcatcctttcctacagatctcagcaaaacgcagagccagtaggggaaattcaagctttcatttgggggcctctggggtcctacctgctggcagttctttcagcagaaagtggggtacgggggatgctgaagagggggaagtggaccccattgcctgttaagtcccatctgtctcagtttgaagcaacacgggaatttccattggaggagggttggcctgccggcctggcccttctctcacgccccctctacttcagctacatttcttatgcatgttcctcaaagctgtgaaaatcaatacaaaaaaaactgacctttacttcattcctgtaacaggctatcaggatctcaaggagatccacctgcatcgagatcagtctcaaaaacggggcatgtaaaacata

SEQ ID NO: 9258 - DNA, 494 bp, Homo sapiens
ccttatttctcttgtcctttcgtacagggaggaatttgaagtagatagaaaccgacctggattactccggtctgaactcagatcacgtaggactttaatcgttgaacaaacgaacctttaatagcggctgcaccatcgggatgtcctgatccaacatcgaggtcgtaaaccctattgttgatatggactctagaataggattgcgctgttatccctagggtaacttgttccgttggtcaagttattggatcaattgagtatagtagttcgctttgactggtgaagtcttagcatgtactgctcggaggttgggttctgctccgaggtcgccccaaccgaaatttttaatgcaggtttggtagtttaggacctgtgggtttgttaggtactgtttgcattaataaattaaagctccatagggtcttctcgtcttgctgtgtcatgcccgcctcttcacgggcaggtcaatttcactggttaaaagtaagagacag

SEQ ID NO: 9259 - DNA, 320 bp, Homo sapiens
caacgatgaggctgctgtcatttgtggtgttggctctatttgctgtcactcaagcagaggaaggagccaggcttttggcttccaaatcactgctgaacagatacgccgtggagggacgagacctgaccttgcagtacaacatctacaatgttggctcaagtgctgcattagacgtggaactatctgatgattccttccctccagaagactttggcattgtgtctggaatgctcaatgtcaaatgggaccggattgcccctgctagcaatgtctcccacactgcggtcctgcgccctctcaaggctggttatttcaacttc

SEQ ID NO: 9260 - DNA, 450 bp, Homo sapiens
cctcccaaagacagcaatgggagaagtgaccccataactgcataaaataatccctcttctttgaagctcttggcaggaatcgctcagccagcaggaaacctttaacccaatacccagaaaaacagacatttggaggaagagggatcttccagattattcttccattctgccccatcctctacagagaaggaaactaagacacttttcaagaatcacaagataagttaatgatagaaagcagagtagaatcttgagtggaggagtgaaaataacattcactttgttcaaatcccagctctaccactttccaatggtgtgaacttgcacaaataactctgagtctcattttcttcatttgtaaaatggagagaacaatctccgcttcaagagattgtcttaaatggaacatgcaaagcatcactgatatcgtttaccaaccacacatagcag

SEQ ID NO: 9261 - DNA, 342 bp, Homo sapiens
aaacttttgagttgtagtcagaaactgttgttggactgcatagttttcaaaagtttttggtacatttctgactttagaaatctggggtaggaatccctttccatatgcatatagactattttctgagcttcttcaaaacatgtttcagtgggttcctgaatgttcctgatgatagtctctcttgtcgaactgtcaatgttaatctctctaggggactgtggctggatgtaaatcttataaagcttctttgccctagaaattccgctccaccgtgaggcaattttcttataggtttcacatgccatccagaattgaatattctcgtcactgtgctccattttt

SEQ ID NO: 9262 - DNA, 201 bp, Homo sapiens
cctctgtggatcccagtttgtcgtggggtcagaggaaaaaactttactatgacacggactatggttccaagtcccgaggccggcagagtcaacaggaggcagaggaggaggaaagagaggaggaggaggaggcacagatcattcagcggcgcctagcccaagcgctgcaagaggatgattttggtgtcgcctgggctgagg

SEQ ID NO: 9263 - DNA, 580 bp, Homo sapiens; identical to SEQ ID NO: 330

SEQ ID NO: 9264 - DNA, 318 bp, Homo sapiens
ctgccggcgccgggaaaggggctcacgtaccagggactctccattgaggtagatgaggtcgaaggcgtacaaacacacctgcacctggatctcagacgcatccacctccttgcgtttgcgggtggtgagcacttggaatggctggatctgcttcttttcccggtcccaagccacggcttcggtgtccaggatgaaggatgtgaccgatgggagtttaatcttggggatgcggctgatgatgtccgggtacttcccagtgttgtcttcctgattcctgctgaagatcttcacctccccgccttccagggcgtggatctg

SEQ ID NO: 9265 - DNA, 232 bp, Homo sapiens
cctgagatcagaggaaagcccccaatccgtgtttcacaggtactcacaagagaaaatgctaggagggttgtgccttgctaagggaaggaagaaaagttgggggtggggagcatgagatttgatgcagttagtaaagaatgaactctgaaaagtgttacgagagagagagagacttaaaacaaccatttgtttagctcatgactctatagattggcaattgagctgagttcag

SEQ ID NO: 9266 - DNA, 199 bp, Homo sapiens
aaaagaagaagaaaagctaccaaagctgaaatggtggcacctccttcgagtgagcccgggagtcctccctgacggccgaggcaggctctggccgcactcccgctcgagtctcccttcctgtctgcagattctgcgtgacagtcacggaacggcgtgatgggggcagcagagcgtgggggcctctgtccagcactcgtgg

SEQ ID NO: 9267 - DNA, 474 bp, Homo sapiens
ctgatgactttcttaatagaattgcattgacggatgcttaccttttatacacaccttcccaaattgccctgactgccattttatctagtgcctccagggctggaattactatggaaagttatttatcagagagtctgatgctgaaagagaacagaacttgcctgtcacagttactagatataatgaaaagcatgagaaacttagtaaagaagtatgaaccacccagatctgaagaagttgctgttctgaaacagaagttggagcgatgtcattctgctgagcttgcacttaacgtaatcacgaagaagaggaaaggctatgaagatgatgattacgtctcaaagaaatccaaacatgaggaggaagaatggactgatgacgacctggtagaatctctctaaccatttgaagttgatttctcaatgctaactaatcaagagaagtaggaagcatatcaaacgtttaactttattt

SEQ ID NO: 9268 - DNA, 260 bp, Homo sapiens
ctgtttccttctcttcctttgtggtgccattcccagggcacaggccatagctgtagttggggggcagtgggtatgggatgtgcccccggggcatcaggaggaaagtgcgtgctacatgccaggtactgcagacagagatgaagatgaaggaggccctgaggctgatgcctttttcataaagaagcttaataataaggaagactgccgaggaagagtcaaatgctccattgtacagagtgatgatggtcgaacggtgttgg

SEQ ID NO: 9269 - DNA, 136 bp, Homo sapiens
ccaaacagtgcccagcttaagcatccctggcatcagactatggccttcaagagcactagggcatatgcttttggcagcataacgggctggcttggtgatggagggaaaaagccttgagccaggcagaagtttgtgg

SEQ ID NO: 9270 - DNA, 251 bp, Homo sapiens
ccttcgtcagcctgcccagagaaggggagcagaacttcagtgcagaggagttctctgacatctctgagatgcgggccttggcagaactcctgggcccctatggcatgaagttcctgagtgaaaacctgatgtggcatgtgacctctcagattgtggagctgaagaagctggtggtggaaaacatggacatacttgttcagatcagatccaactttagcaagccggacttgatggcttccctgctgccccag

SEQ ID NO: 9271 - DNA, 356 bp, Homo sapiens
ctgctcggaaagctctggacagatgcagtgaaggctccttcctgctaaccacatttcctcgtcctgtgactgtggagcccatggaccagttagatgatgaagagggacttccagagaagctggttataaaaaaccagcaatttcacaaggaacgagagcagccacccagatttgcacagcctggctcctttgagtatgaatatgccatgcgctggaaggcactcattgagatggagaagcagcagcaggaccaagtggaccgcaacatcaaggaggctcgtgagaagctggagatggagatggaagctgcacgccatgagcaccaggtcatgctaatgagacagggtgagtctagg

SEQ ID NO: 9272 - DNA, 406 bp, Homo sapiens
ccaggctggtctcgaactcctgatctcatgatccgtctgcctcggcctcccagagtgctgggattacaggcatgagccactgcgcccggccaagaaagtatgtttttagaggtgtgtgtaagtgcatttgtattacctatgaacaaaattacctgactcttgtcccaggaaagctgtttcgcattttcgctttttgattggtattatccagttctatgtagttcatattattgttctgtctgactctcagaaattacttcttcacgccagtgtcttgttgcatgactttgatgtcacctataggaatacacctcactgcacgtaagtgggtatcttactgtataaaaggtctacatggctttaggttttaggacaaatgtgtagatttatagaccatttctgctgg

SEQ ID NO: 9273 - DNA, 306 bp, Homo sapiens
  unsure (11): n=A,T,C or G
  unsure (277): n=A,T,C or G
  unsure (280): n=A,T,C or G
  unsure (297): n=A,T,C or G
  unsure (301): n=A,T,C or G
ccttgcctcanatccaaggtcactcggaagaggccatgtctaccctcaatgacactcatggaggaaatgctgagagaagcattcagatgcatgacacaagagccaatgaaaggccctattgctatgcaatctggtccaaaaccactcttcaggaggatgtcttcactggtgggccccacgcaaagcttcttcatgagggaatctaagactttgggggctgtccagattatgaatgggctcttccacattgccctggggggtcttctgatgatcccancanggatctatgcacccatntgtntgact

SEQ ID NO: 9274 - DNA, 243 bp, Homo sapiens
ctgtggcttagctggctttgctggtcgtaatggaggacaaaagtgccttctggtgaaactcagcttccatagtgatgggacctaagggtagcagagtttatggtgaccctgtagtgtatctccagaaatggtgattgtttgaatgcatgtaagacattccctagggactccaagaaatattgattagaggaagatgtggtgctttgaaagggacttggtgttcctacatgaaccaagtgaagg

SEQ ID NO: 9275 - DNA, 548 bp, Homo sapiens
aaataaaattcagtccggccgcggtggctcatgcctgtaatcccagcactttgggaggccaaggcagacagattatctgaggtcaggagttcgagaccagcatggtcaacatggtgataccccatgtctactaaaaatacaaaaaaataaaaattagccaggtatggtggtgggtgcctgtaatctcagatacttgggaagctgaggcaggagaatcacttgaaccagggaggcgaaggttgcagtgagccgagattgcaccattgcactccagcctgggcaacaagaacgaaactccgtctcaaaaaaaaaaataggccaggcgtggtggctcatgcctgcaattccagcactctgggaggccgaggcgggcggatcaagaggtcaggagatcgagaccatcctggctaaaccccatctctactaaaaaacaaaaaaaatcagccagacgcggtggcgggtgcctgcagtcccagccactccagaggctgaggcgggagaatggcatgaacccaggaggtggaggttgtagtgagccaaaatcgcgc

SEQ ID NO: 9276 - DNA, 333 bp, Homo sapiens
aaaaaaaacaacagcgtaaatattagcccacaagagcagtcctaaacaatcacaattacactgtactacccaagaagactgtttattgtgaagcatttacctttcaaaaaatcattacatttctatttcttggtggagcagcacattgtggagtgtgattcttaattcttcattgagtttgtcaataggacattgatgctggataggttgtcttttgtttttatgtctcagaccatcttgtgagattgtttgcctatctcataatacagttttatgcagaaaggttgaaactatgtaaatggtttttatggaaattatcagttacaacatttt

SEQ ID NO: 9277 - DNA, 157 bp, Homo sapiens
aaaacatcgcgctaagtggacgaattcagacacaaccgtctacgtgttgtatggctgcattcacgttcaagtcaagtccaaatagggcacactgcagagacaaagccaggtcatggttgctcaggaccggaagcctgttgggggcggggggtggggt

SEQ ID NO: 9278 - DNA, 252 bp, Homo sapiens; identical to SEQ ID NO: 151

SEQ ID NO: 9279 - DNA, 546 bp, Homo sapiens
ctggagagattgttgaagcagatgttgccattgggaaaggcgatgagactccacttacaaatgtgaagacagaggcatcccctgaaagcatgttgtctccatcacatggctcaaatcccattgaagatcctttagaggcagagactcagcacaagtttgaaatgtcaggatgccccaggtgaggatgaggaggaagatggtgtcagtgaagcggccagcctagaggagcctaaggaagaggatcaaggagaaggctacttgtcagaaatggataatgaacctcctgtgagcgagagtgatgatggcttcagcatacacaatgctacactgcagtcacacacactggcagactccatccccagcagccctgcttcttcacagttctctgtctgtagtgaggatcaggaagctattcaggcacagaaaatttggaagaaagccatcatgcttgtatggagagctgcagctaatcataggtatgccaatgtcttcctgcagcctgttacagatgacatagcacctggctaccacagcattgtgcagagg

SEQ ID NO: 9280 - DNA, 346 bp, Homo sapiens
aaaatgtctttgagtctgtccctttctctctgttcccactgcccctgctcaatactgtcatttgattagactattgtataagcctctcttatgaactgaatatttttgtcttccccaaattcatgttgaagctgtcactcccaatgtgacggtatttggaggtaaagcctctgggaggtaattggtttagatgaggtcatgaggatggggcctccatgatgggattagtgcccttgtaagaaagtggaagagagaccagagttctttatctccaccgtgtaaggccacagcaagaaggaggccgtctccaagccaggaagagagccctcccagggaactcactcag

SEQ ID NO: 9281 - DNA, 539 bp, Homo sapiens; identical to SEQ ID NO: 551

SEQ ID NO: 9282 - DNA, 459 bp, Homo sapiens
gtgttgtgctgtggggaagggagaaggatttgtaaaccccggagcgaggttctgcttacccgaggccgctgctgtgcggagacccccgggtgaagccaccgtcatcatgtctgaccaggaggcaaaaccttcaactgaggacttgggggataagaaggaaggtgaatatattaaactcaaagtcattggacaggatagcagtgagattcacttcaaagtgaaaatgacaacacatctcaagaaactcaaagaatcatactgtcaaagacagggtgttccaatgaattcactcaggtttctctttgagggtcagagaattgctgataatcatactccaaaagaactgggaatggaggaagaagatgtgattgaagtttatcaggaacaaacggggggtcattcaacagtttagatattctttttattttttttcttttccctcaatccttttttattttt

SEQ ID NO: 9283 - DNA, 113 bp, Homo sapiens
ccagcttcttcagcaaggtcatgggcatcctcatcaaccgcaagacagaccagctcgtgtcctttcttcggaagaaggatgacttcgtggacctgctgctgcagcacattggc

SEQ ID NO: 9284 - DNA, 179 bp, Homo sapiens
  unsure (71): n=A,T,C or G
  unsure (168): n=A,T,C or G
gttttaaggcgccatgaggggtgacagaggccgtggtcgtggtgggcgctttggttccagaggaggcccangaggagggttcaggccctttgtaccacatatcccatttgacttctatttgtgtgaaatggcctttccccgggtcaagccagcacctgatgaaacttncttcagtgagg

SEQ ID NO: 9285 - DNA, 542 bp, Homo sapiens; identical to SEQ ID NO: 331
  unsure (492): n=A,T,C or G

SEQ ID NO: 9286 - DNA, 484 bp, Homo sapiens
  unsure (426): n=A,T,C or G
ccattggaatctcatttataaatggaccttttaagtatattaattcctcttcagaattgagctggacacatttggcattcttagtttgtcatataaccaggtttatccttagtctaactgcaagggatagaacctgccctaggtcacaatcattctgtccaatccagccaaggttccctccacatatgaagatggaccatggcaggatacaactgattgtgtggcaccatgtattagcagtgggaatatgtatcacatatgatgcagcctttcatatttcagcagtttgccactgtgactgtctggcaagcccccagatggcgttatattaattggattagattattttgctcaccttatgtaatactgtaacttcctataacctaatattttcggtatcattaaccaaaatttcacactcatagnttgctaaagagaatgttattcaatcattaaactctgaactgatttcttctatacattt

SEQ ID NO: 9287 - DNA, 502 bp, Homo sapiens
ctggatgacctggggcaagccgcttccccactctgtgcctcagcttttcatcagcaaagtagagataaaaacagcatccacctcactgggctgctgtgaggattatcggagcttgtatttgtgctcggcacaggtaagcaccagttaaagaaactgggtaacaggacaaatgcttatctacacagacaagactcctgaagttataaaccacagactatggtctacacagctcatatcaggtgctgtgcccagggcttgggacctaccagcacatttaaccctgtaaggtagattattattatacccattttccaggtaaggaaactgaggcatggatttacatagaggtgggggcggggctggacagaggtaccaaagctcacagcttctagaaggatgttctgtgcatgaggcagtggctatgaccctgctggactaattcaaggacatgctctccccaaattgtgcctctgcatctcaccgagatggctcagttctgtgc

SEQ ID NO: 9288 - DNA, 375 bp, Homo sapiens
  unsure (25): n=A,T,C or G
  unsure (182): n=A,T,C or G
  unsure (195): n=A,T,C or G
  unsure (206): n=A,T,C or G
  unsure (230): n=A,T,C or G
  unsure (296): n=A,T,C or G
  unsure (353): n=A,T,C or G
  unsure (364): n=A,T,C or G
ctgatgcctcactactagatgcagngctgggaccttcctcttttggagctgtcccatgtacagtggacccaagctcaggaccttcgtggagctgcttctccaacctgagaaactcaagacccatcctcccgctgtcactttggacaatggaaatctacattttcttttcccttttttttttnttttgagacagantctcgccctgncacccaggctggagtccagtggcncaatcttggctcactgcaacctctgcttcccgagttcaagcaattctcctgcctcagcctcctgantagctgggattataggcatgcaccaccacacccagctattttttgtatttttactgnagacagggttncaccatgttgg

SEQ ID NO: 9289 - DNA, 337 bp, Homo sapiens
  unsure (83): n=A,T,C or G
ccaagggtaggggcggggcggggaagtgaaccccgacggtcagcgctttgtcatctggtttcagccccgctgccgtgcacggngggactggagcaagtcgctcacctgaaatgagtatgagcagaccttccctgggttacgaattgagatgggatgaaaatgctttaacttcgagtgttttgaaggattaaataaccgaagtacaaagtagtagtagcggagacagtaaggaagtcgggcgtggcggcgcgcacctgtggtcccagctactcggaaggctgaggggggaggatcacttgagcccaggagttcgaagctgcagtgagctgtgatgtgg

SEQ ID NO: 9290 - DNA, 316 bp, Homo sapiens
ctggaatgttgttggaggtctggtctccttccttggggaaagtgattttggttccttctttccaccccttcttcacttcgatggtcaatattttgtcttcgtttcgaatgctctttccgtcggggtttagccgcttgtgggagattttcatcttcttggtacagccgctgtagatctcttcaagggagactcgaaggtcgtgggtgactgggggatcttgcttctttcgggcgggctcttgggcagagcgggagcggccaaagttcacgttggtgaagccacccatgcccatagggaagccagagaatgggtcatc

SEQ ID NO: 9291 - DNA, 287 bp, Homo sapiens
cctccacccaggtgccacgcacggtgcctcatacccagagagtagccaacattggtactcagaccacaggacccagtggggtaggatgctgtacaccaggccggccgctcctgccgtgcaaatgttcctcagcagcacatagcacctatcgggtccaggagccggctgtgcacatcccaggacaggagcccctgaccgcgtccatgctggctgcggcgcccctgcatgagcaaaagcagatgattggggagcgtctctacccccttatccatgatgtccacacccag

SEQ ID NO: 9292 - DNA, 380 bp, Homo sapiens
aaaaaatcttaggtttttttaagaagcagaaataatttccaaattgcctccagagacaatgattttatcctctgcagaagctggtcagaaccttcttgatcacagccccagttagatacagggaagaatggcgcttcctacagcttcagcggcctcagctcagctctgtgccccaaggccaaaccagctcatctccagccccatccatcctattcttgctgagtcaccagtctcatcatcttcagagccatgtccccttggtcagaaggaaccatatgaccagctttcagaatccagtagaaagcaaggttcttgtaggacttgacaaaagcagatgtttccaaagatttagggtcactgtacagggccttccacttcag

SEQ ID NO: 9293 - DNA, 366 bp, Homo sapiens
ctgcagggcgaaccgctgcttcctattggtgtccaccacgcgctgcacatcttcagcagagaagccgcggaactggggcaactgcaggagggtgcccaggggcacgaagccatctgtgggcaggcagggtgctcaggagctaaccttgctctggactgggccagggttaacagggagccacaggcaaccgaaacaaagtctgggcttggagatcgcttgggcatcctctgtgggacctttagaaagtctcccctttctgggccgcagttttttcaacttacataaaaagaggatctgcctcacggaggggcagggaggtgagtgcccagcatagcgctggcccggagtgcacactcacaccaccag

SEQ ID NO: 9294 - DNA, 333 bp, Homo sapiens
aaacttatctgtttgtaaattgtaactgattaagaattgtgatagttcagcttgaatgtctcttagagggtgggcttttgttgatgagggaggggaaactttttttttctatagacttttttcagataacatcttctgagtcataaccagcctggcagtatgatggcctagatgcagagaaaacagctccttggtgaattgataagtaaaggcagaaaagattatatgtcatacctccattggggaataagcataaccctgagattcttactactgatgagaacattatctgcatatgccaaaaaattttaagcaaatgaaagctaccaattt

SEQ ID NO: 9295 - DNA, 347 bp, Homo sapiens
aaagctgtccatttatcttgatgcctaaaagttgggagatgctataaagacgatgacatttctaaactggactacactgtttctggaaactgttaagctgagtccagtacttttaagcctgacagtatctgaggatcctaatatggtgctaagccttcaggggtggagcggggaaagagtattaaaaaaggagtgttaaaaaatccctccaaaattcaggaatcagcatcataaatttaaccattcaaaatgtggtattatagaaaccaaaacattcattttgaccaaagaaaatctgtgagtcatttcctaagcctgggaaacaagccacaggatatagtgacttt

SEQ ID NO: 9296 - DNA, 297 bp, Homo sapiens
ccagctctcgagtgggggtgatgattatggctccaacctgactcttttttaacttctcttctcttctcagaagaatttccaggatggggatgacaaaagcgagtgttttgccactacctgtgacccgaggcactcaccgcttctgcagcgacatctttgtttcgcatgaacagagggatggttgcggactgcaccggcgtcatgtacgggaagcccagctcccgcagcgcgcccagcacctgcgggtgcagcggcacaggcagcgactcccaggagccctctgtcacatgctccatg

SEQ ID NO: 9297 - DNA, 247 bp, Homo sapiens
ctgctatttctgcttcagcgaaagccacgatcccagcacacaggcatgcgctactgtgaggtcaggacgaggaaaagagccaggccctttcacccagatcgcggcggcccagcaggacttgcccggagtgtctcatgcagacttttgtgtgtgtgaagaaaagctttttgtcttgctctgggcaccctgaggccaaatatataatacttacatccagccccaaagcccccagtctgtctccactttt

SEQ ID NO: 9298 - DNA, 234 bp, Homo sapiens
  unsure (192): n=A,T,C or G
aaaaacaaaaagagggaatggatgcagaagcccgtctgggctttccgtggagtcgccccttcccaatggcgatggccgctccctgtggcctcagcttcctccgtggaatgaaggggtccaggtgacaccttcctcgaagggtgggcgtgggcctaaggctcccaagtcggccaggggctcggcctggctcanaagaggtgcttcacatcaacagtggtacggggtggccgctgg

SEQ ID NO: 9299 - DNA, 282 bp, Homo sapiens
ctgcagtccctagatctctgcctccgaacttgtgcttctcagaaccccctgagcccctctgggccttgcccctgtcctacatagctttcacaccgaatttatggattggtcccttagtaaccctctaagccttgctcacagttcttaaaaccgtctatctccttccaggctctgtgaagctggtgaccccggaggggtccccagtccggggacttcgcacacctgagatccccatgaccgaagcggtggaggccgtggctatggttggaggtcagcttcagg

SEQ ID NO: 9300 - DNA, 392 bp, Homo sapiens
aaacaccctgagatatgcagacagggtcaaggagctgagcccccacagtgggcccagtggagagcagttgattcaaatggaaacagaagagatggaagcctgctctaacggggcgctgattccaggcaatttatccaaggaagaggaggaactgtcttcccagatgtccagctttaacgaagccatgactcagatcagggagctggaggagaaggctatggaagagctcaaggagatcatacagcaaggaccagactggcttgagctctctgagatgaccgagcagccagactatgacctggagacctttgtgaacaaagcggaatctgctctggcccagcaagccaagcatttctcagccctgcgagatgtcatcaaggccttgcgcctgg

SEQ ID NO: 9301 - DNA, 404 bp, Homo sapiens
ggcggagaagctggagtgactctagggcagccgcatctttcgcgtcaggatctcaccaccttggatgttaccaagttgacgccactttcacatgaagttatcagcagacaagccacaattaacataggtacaattggtcatgtagctcatgggaaatccacagtcgtcaaagctatttctggagttcatactgtcaggttcaaaaatgaactagaaagaaatattacaatcaagcttggatatgctaatgctaagatttataagcttgatgacccaagttgccctcggccagaatgttatagatcttgtgggagcagtacacctgacgagtttcctacggacattccagggaccaaagggaacttcaaattagtcagacatgtttcctttgttgactgtcctgg

SEQ ID NO: 9302 - DNA, 197 bp, Homo sapiens
ccatcgtgcctctttgggcttccatgggcaactacatcaccaggatggcgcagaagtaccatgagtactcccactacaaggagcaggatgggcaggggatgaagcagcggcctccgcggggctcccacgcgccctatctcctggtcttccaagccatcttctacagcttcttccatctgagcttcgcctgcgcccag

SEQ ID NO: 9303 - DNA, 167 bp, Homo sapiens
ctgcgaatcggggagcccatgtattgacttagtgcggtagcatgcagccctcggcacggagggtcagtccccgctgttcttaaattagggtaaatggcgttggtgtccgtatttacagacttgaaatgtatcaatcctgagcagttccgatgtaaatccgagaccag

SEQ ID NO: 9304 - DNA, 243 bp, Homo sapiens; identical to SEQ ID NO: 622

SEQ ID NO: 9305 - DNA, 499 bp, Homo sapiens; identical to SEQ ID NO: 152
  unsure (250): n=A,T,C or G
  unsure (284): n=A,T,C or G
  unsure (452): n=A,T,C or G

SEQ ID NO: 9306 - DNA, 293 bp, Homo sapiens
cctggcctcacatgacccctgctccagcaacttgaacaggacaagcagcagctacatccttaaggtcgggaaagtaagatgaggatttggatcctgcattgccctgcctcccaccctatctctccccaaattataaacagccatccttgggaagcagcagagttaagacgtctccccactgccctagtgacatacacaccaacaggagagcatgttcagatggcacagaatccagggactgcatttcatgaggagaaactggtaccaaaatatgggtggggagtcggggggtg

SEQ ID NO: 9307 - DNA, 468 bp, Homo sapiens
ggcggccggtgagggggaagcaagtctggtctctgtgattgaagaagtcggctctgggctccagtgcgggaatcacacacatacctcagaatgccgggtctaagttgtagattttatcaacacaaatttcctgaggtggaagatgtagtgatggtgaatgtcagatccattgctgaaatgggggcttatgtcagcttgctggaatacaacaacattgaaggcatgattcttcttagtgaattatccagaaggcgtatccgttctatcaacaaactcatccgaattggcaggaatgagtgtgtggttgtcattagggtggacaaagaaaaaggatatattgatttgtcaaaaagaagagtttctccagaggaagcaatcaaatgtgaagacaaattcacaaaatccaaaactgtttatagcattcttcgtcatgttgctgaggtgttagaatacaccaaggatgagcag

SEQ ID NO: 9308 - DNA, 545 bp, Homo sapiens
  unsure (453): n=A,T,C or G
  unsure (511): n=A,T,C or G
ccagcaaaaaggagcgttttctccaggtgcagtccatgatgtacgatctgatggagtggaggtcccagcttctctcaggaaccttacccaaggatgagctgaaggaactgaagcagaaagtcacgtccaaaattgactatggcaacaaaatccttgagcttgatttgattgtcagagatgaagacggaaatatcttggaccctgataataccagtgtcatcagcttgttccatgcacatgaggaagcaactgataaaatcacagagcgtatcaaagaagaaatgtcaaaagaccagccagattatgcaatgtattcccggatctcctcatcccccacccatagcctctatgtgtttgtgagaaactttgtgtgcagaattggggaagatgctgagctcttcatgtctctctacgaccccaacaagcaaacggtcataagtgagaactacctantgcgatggggcagccggggcttccctaaggagattgagatgctcaacaatctgaaggnggtcttcacggatcttggaaacaaagacctcaac

SEQ ID NO: 9309 - DNA, 342 bp, Homo sapiens
  unsure (187): n=A,T,C or G
  unsure (309): n=A,T,C or G
aaacttttgagttgtagtcagaaactgttgttggactgcatagttttcaaaagtttttggtacatttctgactttagaaatctggggtaggaatccctttccatatgcatatagactattttctgagcttcttcaaaacatgtttcagtgggttcctgaatgttcctgatgatagtctctcttgtcnaactgtcaatgttaatctctctaggggactgtggctggatgtaaatcttataaagcttctttgccctagaaattctgctccaccgtgaggcaattttcttataggtttcacatgccatccanaattgaatattctcgtcactgtgctccattttt

SEQ ID NO: 9310 - DNA, 356 bp, Homo sapiens
aaaaattagtctgtactcaaatgcatagttaaaaaaatgaagcgagatggcagtttgtgcagtaatatctgcccttcgaagttcatgcaaccaactaatgcaatttttcctttcactcgtaaatctgaatgcagttcagtcatttgaaaccatctacaaaatccacaagattaagcagtttgccaagattaatatctaacagttgagcactggagaaagtgagggaaaggagtaaaaacaaacaacgaaaaagaccaagttagctagatatttcaactacataagggaggtgggtgaatgtcaaggctacaaaaacgaaacaaaaacaggaaaaaaaagtggcagcaatttttttt

SEQ ID NO: 9311 - DNA, 243 bp, Homo sapiens; identical to SEQ ID NO: 154
  unsure (13): n=A,T,C or G
  unsure (92): n=A,T,C or G
  unsure (147): n=A,T,C or G
  unsure (159): n=A,T,C or G
  unsure (169): n=A,T,C or G
  unsure (170): n=A,T,C or G
  unsure (182): n=A,T,C or G
  unsure (193): n=A,T,C or G
  unsure (203): n=A,T,C or G
  unsure (229): n=A,T,C or G

SEQ ID NO: 9312 - DNA, 328 bp, Homo sapiens
aaaaagatccaaatgtgactgagatcattccagcctgcactttttatttgtaggcagaaggaacgggataggttgaggggcgtgatgggggctctcgccacctcttgtctgcacctctggaacaggtggtagccgaatcattcaagtcctacctggtcagactcccaaccacgctgaggcaggcccttacctggatggcctcatgggcctccctcttgaaaagaccctcactctgtttggaaaagatcccttagcagccataatcaggaaagagactctagagcgagcccagggcttccccaaagcggattttctgtcctgttttcag

SEQ ID NO: 9313 - DNA, 313 bp, Homo sapiens
cctcggtggggccgggcaggcagggcgggagctagcctgcaagagaaacagccccaatgctgggtaagagagcagttcaccccatccccccctccacgaccctggcgcccgccctgtacctgaaggcgcccgggttctgctgcagcgcatctggtaccatgtcttcattctcctcctggcagagggagcacatggagtagacgagccgctgcagggaagggaaagtgagcgcgtggcacagggctcgctgctggaaccctgccagggcatgcagacgcaccgggctaggtgtccctgccccgggatcctccag

SEQ ID NO: 9314 - DNA, 430 bp, Homo sapiens
  unsure (395): n=A,T,C or G
  unsure (407): n=A,T,C or G
ccaacatggggaaaccccatctctactaaaaatacaaaaattagccgggcgtggtggagcacctgcagtcctagctactcaggaggctgaggctggagaatcgcttgagcccggaaggtggaggtgcagtgagccaagatggcgccactgcactccagcctgggcaacaaccacaactgaaaaaaaatctactgaggccagagtgagttggggcggggagcatggagagggggtcaggcttagccccaacaactcagaatttcacttccttgtacggccctcactttctccacctggccccggggcaggtctgagggtctgaagtctgttgatctgaaggtcctaggcaaatccagtcacttgggagccggagatatttaacatcacggcccggncccctttcccangggactcatttcctagcactctc

SEQ ID NO: 9315 - DNA, 310 bp, Homo sapiens
ccggcctgcagaccgactgcgaggcgctgctcagccgcttccaggagacggacagtgtacgcttcgaggacttcacggagctctggagaaacatgaagttcgggactatcttctgtggcagaatgagaaatttagaaaagaacatgtttacaaaagaagctttagctttggcttggcgatattttttacctccatacaccttccagatcagagttggtgctttgtatctgctatatggattatataatacccaactgtgtcaaccaaaacaaaagatcagagttgccctgaaggattgggatgaagtttt

SEQ ID NO: 9316 - DNA, 209 bp, Homo sapiens
  unsure (187): n=A,T,C or G
  unsure (189): n=A,T,C or G
cttttttttttttttttttttgacctggagtctcgctctgtcacgaggctggagtgcagtggagcgatctctgctcactgcaacttctgcctcccgggttcaaacaattctcctgcctcagcctcccaagtagctgggactacaggcgcgtgtcaccatgcctggctaatttttgtatgtttagtananacggggtttcaccatgttgg

SEQ ID NO: 9317 - DNA, 435 bp, Homo sapiens
ctggattaaggacatgatcttgaacttccagacatctgaatttcagtacacactggatttaggtacctaatgggtggtcctggacacactgtgtacacgtaaaagagaaactgtggggaaaaatgtagaaaacagaaaggagccaccaaaaatccatgagtggaggacagtaaaaggtaggtggacagactggtttgtgttaaagataatggtctagaaggggctatactcagaattattcctgtgtccgtgcaggcagttgagattattaacaggtggtggagagaacaggttgctgttgcagattcagtgtctgagggtagaattatactaggagacctataggcacttgtgtaggtttttggcaagaaactagaaaagaaggcactgtgatgggattcctaagggtggtacttactcctgggaggggcatgg

SEQ ID NO: 9318 - DNA, 373 bp, Homo sapiens; identical to SEQ ID NO: 90

SEQ ID NO: 9319 - DNA, 175 bp, Homo sapiens
ccagagggaccgtaagactggtacaagtttacaccataagaggcgacgtggtcagccacaatgtcttcacctccacaggggctcatcacggtggtcagggcaagggtccccagcatcagagctttgtttaggatcatcctcttcccaaggcagccttagcagttgctgttctgag

SEQ ID NO: 9320 - DNA, 173 bp, Homo sapiens
ctggcttgcctgctggcctgcttcctggagataggatgctcagacccaccgccgctcttcaggggtcgtggaaggaattaatgcacttccttctgtcccccaatctctgtccctttacgtgtctctggagctgagcaggtattctttttctttcttcatctcagtagagctgg

SEQ ID NO: 9321 - DNA, 353 bp, Homo sapiens; identical to SEQ ID NO: 327

SEQ ID NO: 9322 - DNA, 284 bp, Homo sapiens
aaaaatacagttccccaggttgaggtatgtggtggcctgttgtcacggcagcatgagcacggcggcgcccagggcgggggcggaagggcctagctggagactgccatcacgtagttcttggaggggctgctccggcccagcagcacttggttcttgcaggtgaggagcccacaggaggcggccagtggggcctcctcgtacaagacgcagatggagccgtcctccccaatgcggtaggacacctcataggggtccacccacagggtcagctcgctgggcagcag

SEQ ID NO: 9323 - DNA, 356 bp, Homo sapiens
aaaaaaaattgctgccacttttttttcctgtttttgtttcgtttttgtagccttgacattcacccacctcccttatgtagttgaaatatctagctaacttggtctttttcgttgtttgtttttactcctttccctcactttctccagtgctcaactgttagatattaatcttggcaaactgcttaatcttgtggattttgtagatggtttcaaatgactgaactgcattcagatttacgagtgaaaggaaaaattgcattagttggttgcatgaacttcgaagggcagatattactgcacaaactgccatctcgcttcatttttttaactatgcatttgagtacagactaattttt

SEQ ID NO: 9324 - DNA, 475 bp, Homo sapiens
ctgcggcgactgcggggcccagccaagtgccgcgagtgcgaagccttcatggtcagcgggacggagtgtgaggagtgctttctgacctgccacaagcgctgcctggagactctcctgatcctctgtggacacaggcggctcccagcccggacacccctttttggggttgacttcctgcagctacccagggacttcccggaggaggtaccctttgtggtcacgaagtgcacggctgagatagaacaccgtgccctggatgtgcagggcatttaccgggtcagcgggtcccgggtccgtgtggagcggctgtgccaggctttcgagaatggccgagcgttggtggagctgtcggggaactcgcctcatgacgtctcgagtgtcctcaagcgatttcttcaggagctcaccgagcccgtgatccccttccacctctacgacgccttcatctctctggctaagaccttgcatgcagacc

SEQ ID NO: 9325 - DNA, 314 bp, Homo sapiens
ctgtatatgggttcagattagaaaatattaaataaatacagggaaaaatatttttaattagcttaatttatatatgaagatattttatttaatttgtttttgagacagggtctttctctgtcacccagactggtgtgcaatggcacaaacacatctcattgcggcctggacctcctggcctcaggtactatgcctagctaattttttttattttttgtagagatgcattctcactatgttgcccaggctggtcttgaactcctggcctcaagtgatcctcccgtctttaccttccaaagggttgggattacagg

SEQ ID NO: 9326 - DNA, 545 bp, Homo sapiens
aaacaaacctaaaatcagtttaacctgcaatgagactttggaaccagctacagtccttaaaacagatgccagaaattgctcatgtggtgacagaaactgcagaataggtgaaatgcttgctgtttcctcatatgctcaggttggcatcttgagcttccatggggtttcggtgcccctcaaaaaacctggacctgcaattctggaatgctgccaccaggggaaggtatggcttgatcacttgccagatttatagaaggctcaggtaagtactgcagctcctggggataactgccttggagtagagagaaactgttgagaaatcatggatccagataactccaaaaaaagagtaatgtgcctgtccatgcatcacccttacatacagacatggagacatttacagagtgagtgaatcacagccacatccaggtagatggcaagaacccaagcctatcatcagccacagtccagggaatttctgtgaagaatgggcatacctgccttcctttgtaaataattctcttcttccacttaaatcgttattt

SEQ ID NO: 9327 - DNA, 307 bp, Homo sapiens; identical to SEQ ID NO: 155
  unsure (256): n=A,T,C or G
  unsure (302): n=A,T,C or G

SEQ ID NO: 9328 - DNA, 425 bp, Homo sapiens
aaaaagaagaggaggaggagcgaggactctgaagaagaagaactagccagtactccccccagctcagaggactcagcgtcaggatccgatgagtagaaacggaggaaggttctctttgcgcttgccttctcacaccccccgactccccacccatattttggtaccagtttctcctcatgaaatgcagtccctggattctgtgccatctgaacatgctctcctgttggtgtgtatgtcactagggcagtggggagacgtcttaactctgctgcttcccaaggatggctgtttataatttggggagagatagggtgggaggcagggcaatgcaggatccaaatcctcatcttactttcccgaccttaaggatgtagctgctgcttgtcctgttcaagttgctggagcaggggtcatgtgaggccagg

SEQ ID NO: 9329 - DNA, 345 bp, Homo sapiens; identical to SEQ ID NO: 332

SEQ ID NO: 9330 - DNA, 462 bp, Homo sapiens
ctgagaggccaccagtgaggctgggccttatcttccccgccccacccctccccctctcaggctgtgccagcctcaggcaggccctgtgcatctctgggccagtctcaaatccttactgaatggctagatctgtgtacttcaggtctgtctttctgtttcttccactatttctacggctcataagtctctgtctcttctttcagggcgtctatttctttctcttgttctctctttttcccgtgtgtttccctttggagctgtttatgcctgtctcccttggtccaggtcggtgtgtctttctattaatttattttttgagacagggtctcactctgtcacccaggctgagtgcatggctcactgtagcctcaaactccctggctcaagtgatcctcccacctcgacctcccaagtagctgggaccccaggtgcacaccatcacacccggatttttttttacct

SEQ ID NO: 9331 - DNA, 127 bp, Homo sapiens
aaatccagaagacaaacctagaaaagcagcaagataaatatttacaaacattgtagaaaaacagcagtatttcaagttttgttaaattctttccttcagacataatgtagacatagaggaggaacag

SEQ ID NO: 9332 - DNA, 550 bp, Homo sapiens
aaatatcacaagtaggtcttaagtgtcatctggcatcttctttctgtagccaggtaactcttagatcttattcatcagcctgctgaacagttcctttttcagagacatagataccatccaaaaatttcctgatatccttgtttttaactgttgtggcttgctgaatcaaagccgctgaatttgaaacaagctcaatgtcatttccttcaaggattaattcatctttctgggcttgagatactgaacaagcaacacctggtctcatccgaaccctgcggatgtatttttcacccaagaaatttcggatttcaacaagagacccattctcctggataacaacgttgatggggaagtgagcatacacagacctcatcttgtaacggaagcccagtgtaacacccttgatcatgttctgtacatgactacaaatagtccgaacggtagccagtttctttctgttaccccaccatttgtcaacccggagcctcttttttttctttccaagaaggctgagttctacattgatgtgattgaagtccctccgcaacct

SEQ ID NO: 9333 - DNA, 507 bp, Homo sapiens
ccacggagcccaatcctggcacaatgtggaggaggatatgaatcccaggaggcagggatgactgcaggcatcttggaggctgactaccaaccatggataggtaaatgagtgccaggagttaggagatcacacctcggtagagagagttccttgagccaggaagactatgcacaggctcaggaaggctggctgggcctaaacagaagtgggtcaaaggttaaggagtatgtctcagtctatttgggctgccatagcaaaatgccatagactgggtaactcataaatagcagaaactgattcctcacagttctggaggctgggaagtccaagatcaagttactggcagattgggtgtctggtgggggtccattcctcatagatggcatcttcttgctgagtactcaacatgacaggaggggtgaacaagctccctgaggtctcttttatatgggtactaatcccatccataaaggctctgccttcaagacctcgtcaccttcccaaagg

SEQ ID NO: 9334 - DNA, 437 bp, Homo sapiens
aaaggcacttatttatcattgtaggtgtgtctaaacaattgatattcaaaaacacaactttttgtgtacaaaattttacaatttttaacaaaagcagtgaagacactaaataacccagtggcgacctcttcaaagtgcagtgtccctggtcaccaatgcagatgctactggggcagccagcgggctcagagggtccaactccagacactgcatccatggctgtcctagactgagttgcacttgtaaaagagatggtcccacacctactaaaaaaacaagctactctagtatcaatatgacatcactcttttaccatcaatcatattgcaaaaccatagtatttaacgaccaataaacagccaaatacctaatgccacattgtcgttcaatttacctggctggttaatatcagtctgtgtttgagtatttcttttgag

SEQ ID NO: 9335 - DNA, 358 bp, Homo sapiens
aaaagctccaaccagctcatgccagctttccagagtcccatgatttccatttaagaccatgtggatactttaggatacggccctgaccccacattgccacagaagagggggtaagagtagaaccaaacaagttagcagttttctccacacattgagtctcatctgaaatactactgaggtgcaaaatgtgtgaatctcagctaatgtgcacagaaatacaattttttttgagagacatttgcttaaacgtggtaaagaactcttgttttatggactccttgcttcatgttcattttgtctgtttttcttttggcttttgacaatagctcatcctttttgagtgtgagtttaattatgg

SEQ ID NO: 9336 - DNA, 236 bp, Homo sapiens
catggaggtcatgtcttttcactgatacttttttgatagtttttatataacaaaatccttactctatttataacttaagatgataaggcactataaattaatgacctaaaataatatatttgtctgttatcttttgctatttctacttcactttaatttttagctgtaaaattggtaaatggattcttacaactatctctttccatttcttactatttggttttcaaatttcattt

SEQ ID NO: 9337 - DNA, 502 bp, Homo sapiens; identical to SEQ ID NO: 156

SEQ ID NO: 9338 - DNA, 86 bp, Homo sapiens
ctgacctgcttgaccgaaggatttctgacagactatctttggggatgttttcaagaagggatataagttatttactttgggcattt

SEQ ID NO: 9339 - DNA, 456 bp, Homo sapiens
cctctgcgattttgaaggacaactgctgctaaggagtctatctgtgattggagggttgaaacagtattaggtaagtcttccaaactgtttgtaagatcttgtgagagggagcaatagtacatgagggaagtagaaagcccgaccactccggttccaactgcagtagtcattcctagtcgtactaggatgggtattaactgaacggccctgcattggcacacttgagtttttacagggataggtaggttttgcttcctgggacaatgtcgatttttgggcttagaaaaaccagagtacaggtaccagtccagttgatagggtagcagaggtaggtggaggtaccgcacaggaagaatatgccttggctaggtaagtaaaattggttgtgtatgttaaaaagatgtgtaagcttgtggtctttgtatatccatgctcctagggtgcttgctaaggcag

SEQ ID NO: 9340 - DNA, 542 bp, Homo sapiens; identical to SEQ ID NO: 333

SEQ ID NO: 9341 - DNA, 538 bp, Homo sapiens; identical to SEQ ID NO: 157
  unsure (449): n=A,T,C or G

SEQ ID NO: 9342 - DNA, 323 bp, Homo sapiens
ctgtaagggccatttgaaagtttggaattttaagtgtctgtggaaaatgttttgtccttcacctgaattacatttcaattttgtgaaacactcttttgtctacaaaatgcttctagtccaggaggcacaaccaagaactgggattaatgaagcattttgtttcatttacacaaatagtgatttacttttggagatccttgtcagttttattttctatttgatgaagtaagactgtggactcaatccagagccagatagtagggggaagccacagcatttccttttaactcagttcaatttttgtagtgagactgagcagtttt

SEQ ID NO: 9343 - DNA, 298 bp, Homo sapiens
aaattaaatagctccagacaaaagcatgttattttccacatacgctatctttgtattctgcacagagttccaaggcaaagattgctcctggctttatgaattaccagagatgatgacttgtgtggctgacttatcacaggtcttttactcttccttcctgatagatccttagcttctttgggaggtggcatatgaattggtttccacggaattggattataaaaggctggttctggataggaatttccactgtaaaaacctgtaagttttccattggcataaccatagctctttgcag

SEQ ID NO: 9344 - DNA, 326 bp, Homo sapiens
aaagcagtaaaaattgaggtgcccttggatatccacaagcctaaattgagtacacccttgaaccagagcccctcagttaatggggtgaccgacatggggtagctgatcccagggggcattcccctctcgagctggccctgcactgggtggcctggggattgtgcttccttgcacagtggtgcacatttctatgtgtggatgagattttcttgtcaacttttcctgccaagacactaaatgcttttcagtgctaatactgacctgatagtagagatttctttccctgagtcggatggtagcaggatttacttggtaacccttggttt

SEQ ID NO: 9345 - DNA, 228 bp, Homo sapiens
ctggaagatggccgtactctttctgactacaacatccagaaggagtcgaccctgcacctggtcctgcgtctgagaggtggtatgcagatcttcgtgaagaccctgaccggcaagaccatcaccctggaagtggagcccagtgacaccatcgaaaatgtgaaggccaagatccaggataaagaaggcatccctcccgaccagcagaggctcatctttgcaggcaagcag

SEQ ID NO: 9346 - DNA, 466 bp, Homo sapiens
ccttctgcgccctccctgagcaccggctcaggcaccggggtcaggctgcaggaacacatggacagggagaagtaagagtagtccactgcaacgtatgtcagcatgaagttgatggtgacgatgggggccagaacgttcacttgacccacaaaaacaaaggccatggtcaccaagctggtcaggcagatggcagccacgggtgttttgtttggccccttcccttgtcccagacaggcaagtgcagggatcactttctcctgggcaatgcactgcaggatgcggggagctccataaagtcctcccatgcaggaagccagggacgagatgtataagcccaaaaggaacaggaagcccatgagggataccttttccgctatcaggaagtcatagcgaagggcctctcgagtgcagatggcgcccaggaggaagacgaagacgatgtacagaaaccacgagatgccaacag

SEQ ID NO: 9347 - DNA, 527 bp, Homo sapiens
  unsure (69): n=A,T,C or G
  unsure (161): n=A,T,C or G
  unsure (515): n=A,T,C or G
ctgagctgctgtctgctttggaaaaccgttcctgccgctgccgatggatggaaatgcaatggatttcancttcttatcatcagccagggccaagcagtttttcactgtcttttccagaagttcttcacacttgtctgcatcccaaactggactattacagnggatcacaaacttggcaggcaggccatggcctgcgctgacagcagctccagctacttccaagggcccgttctttttccggagttccaggacagcttccacaaactcctcatagtcgatggtcctgtccccatccttgtcggcctccttcatcatctgctccgcctccacctcgttgaggggctcccctgcgttcattagcacgtacttgagtgtgttccagtcaatgtagcccttgccctctttgtcaaagacacggaatgccgccctcagctcgctctcctggttctgggccttctcatggtaaactcccattagtgccaggaaaccatcgcagttgaagaaccctttgttgnctctgtccacat

SEQ ID NO: 9348 - DNA, 288 bp, Homo sapiens; identical to SEQ ID NO: 2745

SEQ ID NO: 9349 - DNA, 580 bp, Homo sapiens
cctgaggatagacagaatgactcagaaaactccttttgaatgcagccagtctgaggttatgtttctgagcttggacaaaaagccagagagcaagagaaatgaggaagcttgcaacatgcccagttcttcttgtgaagaaagttggttcccaaagtatatagttccatcccaggacttaaggccctataaggtaaatatagatccttcttcagaagctccagggcattcttgcaggagcagtccaaagatggtgacaagtcttttttcttttactttcaaggcagttttaggaagcattccctgtctatcttccaaatatgatctggattttaattttgcaaaaaaaatactgcattttctcacttaaaaagtaggagctaaatgatgagaacacgtggacacatggagaagaacaacacacagtggggcctttcagagggtggagagtgggaagagggagaggatcagaaaaaataactaacaggtactaggcttaatacttgattgatgaaataatctgtacaacaaacccccatgacacaagctgacctgtgtaacaaacctgcatttgtacccctga

SEQ ID NO: 9350 - DNA, 299 bp, Homo sapiens
ctggatttattacttataagtttgctattaacctggtatagctgtattttaatactagggtcatcagatgaagaaagcaaatctaaacaagaaaataatgtcctggttatgtgattatcacatacaggtgggagtacctacaggaagggggaagaagtgaaataattttgaagggacaagcctaaacagtccgagtgggtttccgagtgtgcaaacagtggaaccttcagagattatttttacaaaagaaatgatcagactactagcctgtgtctttgaataaccatccattccccttt

SEQ ID NO: 9351 - DNA, 413 bp, Homo sapiens
tgaaaatcgaatcgggtgtgatcctaggccaagctcatggcccagcagggccagcaggggcagatggcaagtggagacagcaatctcaacttcaggatggtcgcagagatccagaacgtagagggtcagaacctgcaggagcaggtttgccctgagcccattttcaggttcttcagagaagacaaggtggagattgcaagtgcaataacaaggccatttcctttccttatgggcctccgagaccgctccttcatctccgagcagatgtatgaacattttcaagaagcttttagaaacctggtcccagtgacaagagtgatgtattgtgtactcagtgaactggagaagacatttggctggtcacatctggaagcattgttcagcaggattaacctgatggcctatcctgattt

SEQ ID NO: 9352 - DNA, 146 bp, Homo sapiens
aatgacgccgtcatggcacggggaacatttgccaacattcgcttgttaaacagatttttgaacaagcaggcaccacaggctatccatctgccttctggggaaatccttgatgtgtttgatgctgctgagcggtaccagcaggcagg

SEQ ID NO: 9353 - DNA, 391 bp, Homo sapiens
  unsure (280): n=A,T,C or G
  unsure (306): n=A,T,C or G
ctgttgtagtcccaaactctgggctcaagcagtcctccaacctcagcctcccaaagtgctgggattacaaatataagccactgtgcccagcccagttctgtttttttttttagatggagtcttgctgtctcccagcctagagtgcagtggcacaaccccagcccactgcaaactctgcctcccaggttcaatcaagcgattctcctgcctcagcctcctgagtagctggcattacaggcatacgccaccacacccggttaattttttgtatttttagtanagacggggtttcaccgtgttagccangatggtcttgatctcctgacttcatgatccgtctgccttggcctcccaaagtgctgggattacaagcgtgagccgctgcacctgg

SEQ ID NO: 9354 - DNA, 340 bp, Homo sapiens
ccagggcccctgcagcctgcctgaatttcaactgcatgctgattctcttgccagtctgtcgaaatctgctgtccttcctcaggggttccagtgcgtgctgctcaacaagagttcgaagacaactggacaggaatctcacctttcataaagtggtggcatggatgattgcacttcactctgcgattcacaccattgcacatctatttaatgtggaatggtgtgtgaatgcccgagtcaataattctgatccttattcagtagcactctctgaacttggagacaggcaaaatgaaagttatctcaattttgctcgaaagagaataaagaaccctgaaggagg

SEQ ID NO: 9355 - DNA, 304 bp, Homo sapiens
  unsure (18): n=A,T,C or G
  unsure (61): n=A,T,C or G
  unsure (279): n=A,T,C or G
cctcaggaaacttacagncatgacagaaggggaggcaggcatgtcccacatggtggagcangaggaagagctcacctacagcaaattatttaagaccgagcatttgtctctgttctgttccctctctggacgcaccctcctgcctccaccctgacttgccgtctcctgagcactgaagatatttttggcttgtccgatgtgactccacagacagcagaaacgcttgcttgatcagggcagcatcagggcaccacacatgcctgggcttgcacaacgcancgggagcactgccactcagcagcag

SEQ ID NO: 9356 - DNA, 297 bp, Homo sapiens
ctgagagaggctgaagagattctgcaagtaagcttccacgcagaaggtgttggaaagactttgagagtcccccagctttctgaccctggcttttgtggagaggtctgggaagatgggagatagtgagctcaaagaaggagaagataatggcgtatgtcccacattttctcccagggtatggcagcctccctaatacccttataagctaggaagctcctaggatgctgcagctcagtcaccatttagtaatgtctggagagatttgtggttgtcctaagagtgggagggtgctgcagg

SEQ ID NO: 9357 - DNA, 230 bp, Homo sapiens
  unsure (42): n=A,T,C or G
  unsure (88): n=A,T,C or G
  unsure (123): n=A,T,C or G
  unsure (139): n=A,T,C or G
  unsure (148): n=A,T,C or G
gtacaagctttttttttttttttttttttttttttgggacanagtcttgttctgtctcccagtctggatggagtgcagtggcgccatntcggctcactgcaacctctgcctcctgggctcaanaaattctccctgcctntgcctccanagtagctgggattacagatgcccgccaccacgcccagccaattttttgcatttttagtagcgacggagtttcaccatgttgg

SEQ ID NO: 9358 - DNA, 373 bp, Homo sapiens
ccaacatggtgaaaccctgtctccagtaaaaatacaaaaaatagctgggtgtggtggtgcatgcctataatcccagctactcaggaggctgaggcaggagaattgcttgaactcgggaagcagaggttgcagtgagccaagattgtgccactggactccagcctgggtgacagggcgagactctgtctcaaaaaaaaaaaaagggaaaagaaaatgtagatttccattgtccaaagtgacagcgggaggatgggtcttgagtttctcaggttggagaagcagctccacgaaggtcctgagcttgggtccactgtacatgggacagctccaaaagaggaaggtcccagcactgcatctagtggtgaggcatcag

SEQ ID NO: 9359 - DNA, 222 bp, Homo sapiens
  unsure (99): n=A,T,C or G
  unsure (135): n=A,T,C or G
  unsure (202): n=A,T,C or G
  unsure (209): n=A,T,C or G
ccttcaactgtcaagacaaactttgcaactggatcccggtgggacagtgccctgcagcgaggagtactgtatatgccaatgagagggcccagcttctangaaccgttacaatggcgtcccgagtcattttccctntcccacttgcattcgagagtgagaaaacacacaaggtggccttgattctcactcaccacaatccccntgtacanaggggtctgtttc

SEQ ID NO: 9360 - DNA, 323 bp, Homo sapiens
ccttggcatggaggaggcggcctctcctggcaactcaccaatggggacttatcattcatataaaccatggggtcctgcagaggaagaaacaagagtgaaggactaagaattctggagctgaaagcaccaagaatgcaggggacccttgccccagccacctggggaggtggaagaggacacagatgggtgcagggcaccgacatccttcctggggtgctcaccagggacttctcctcctgcctgagccactggtagtcctccaccatctgcttctgctgtttgtccaggatttgccgcattttgaccttttcagcctcccacag

SEQ ID NO: 9361 - DNA, 290 bp, Homo sapiens; identical to SEQ ID NO: 159
  unsure (260): n=A,T,C or G
  unsure (274): n=A,T,C or G
  unsure (275): n=A,T,C or G

SEQ ID NO: 9362 - DNA, 232 bp, Homo sapiens
cctagtatctggcttgtgttttttgggtataacgtggtgactccacagcctctccagctcaggacagcagggctttgaaagcagagaatttgggtatgaatcctagattttccaatgactaactctataatatggaggagttctatctgattatcctcgaatcatcctttgtaaaatggaataatatgcttctcttccttcgatttgttgtaaggagccaatgaaactgtgg

SEQ ID NO: 9363 - DNA, 529 bp, Homo sapiens; identical to SEQ ID NO: 552
  unsure (297): n=A,T,C or G
  unsure (315): n=A,T,C or G
  unsure (339): n=A,T,C or G
  unsure (378): n=A,T,C or G
  unsure (481): n=A,T,C or G
  unsure (484): n=A,T,C or G

SEQ ID NO: 9364 - DNA, 293 bp, Homo sapiens
ctgccacagacacccccttcctgtttgaagactgagataatgtctcccctgtaccaagatgaagcccctaagggaacagaggcttcttcggggacagaagctgccactggccttgaaggggaagaaaaggatggcatctcagacagtgatagcagtactagcagtgaggaagaagagagctgggaacccctccgtggtaagaagcgaagccgtgggcctaagtcagatgatgacgggtttgagatagtgcctattgaggacccagcgaaacatcggatactggaccccgaagg

SEQ ID NO: 9365 - DNA, 308 bp, Homo sapiens; identical to SEQ ID NO: 4308

SEQ ID NO: 9366 - DNA, 373 bp, Homo sapiens; identical to SEQ ID NO: 6

SEQ ID NO: 9367 - DNA, 444 bp, Homo sapiens
cctctgcgattttgaaggacaactgctgctaaggagtctatctgtgattggagggttgaaacagtattaggtaagtcttccaaactgtttgtaagatcttgtgagagggagcaatagtacatgagggaagtagaaagcccgaccactccggttccaactgcagtagtcattcctagtcgtactaggatgggtattaactgaacggccctgcattggcacacttgagtttttacagggataggtaggttttgtttcctgggacaatgtcgatttttgggcttagaaaaaccagagtacaggtaccagtccagttgatagggtagcagaggtaggtggaggtaccgcacaggaagaatatgccttggctaggtaagtaaaattggttgtgtatgttaaaaagatgtgtaagcttgtggtctttgtatatccatgctcctagggtgc

SEQ ID NO: 9368 - DNA, 445 bp, Homo sapiens; identical to SEQ ID NO: 4402

SEQ ID NO: 9369 - DNA, 441 bp, Homo sapiens
  unsure (398): n=A,T,C or G
  unsure (401): n=A,T,C or G
  unsure (417): n=A,T,C or G
ctgtgtgcggcgacgagagagtgtagaaataaagacacaagacagagataaaagaaaagacagctgggcctgggggaccactaccaccaatgcgcggagaccggtagtggccccgaatgtctggctgcgctcttatttattggatacaaagcaaaaggggcagggtaaagagtgtgagtcatctccaatgataggtaaggtcacgtgggtcatgtgtccactggtcagggggcccttccctgcctggcagccgaggcagagagggagaggagacagagagaaagacagcttacgccattatttctgcatatcagggactattagtactttcactaatttactactgctatctagaaggcagagccaggtgtacaggatggaacatgaaggcggactangancgtgaccactgaagcncagaatcacagggagacggttagg

SEQ ID NO: 9370 - DNA, 493 bp, Homo sapiens
ctggctaattcagtcatgcaaactctgctctcacagttaaaacagttctatgagccaaaacctgatctgctgcctcctctgaaattagaagcttgtattctgacccaaggagataagatctctctacaagaaccactggattatctgctgtgttgtattcagcattgtttggcctggtataagaatacagtcatacccttacagcagggagaggaggaagaggaggaggaagaggcattctacgaagacctagatgatatattggagtccattactaatagaatgattaagagtgagctggaagactttgaactggataaatcagcagatttttctcagagcaccagtattggcataaaaaataatatctgtgcttttcttgtgatgggagtttgtgaggttttaatagaatacaatttctccataagtagtttcagtaagaataggtttgaggacattctgagcttatttatgtgttacaaaaaactctctg

SEQ ID NO: 9371 - DNA, 261 bp, Homo sapiens
ggcaaaagaagatctgacagctcctatataccttatcttactgaattcttaaactttgaaccagttcttccacttactgacttgttaccactgctgactttctgaaaagttttccagtttttgttttttgttttttgttttccagtaggggattagaatgtttagtcctacttagtaagaaaaatattgtatcaaattacctttaggctatgtatataaggtgtatatgaagcataaatgaatttcatgtttagtcttgag

SEQ ID NO: 9372 - DNA, 158 bp, Homo sapiens
ccgaccgcgagccgtccaggtctcagtgctgtgccccccccagagcctagaggatgtttcatgggatcccagccacgccgggcataggagcccctaggaacaagccggagctgtatgaggaagtgaagttgtacaagaacgcccgggagagggagaag

SEQ ID NO: 9373 - DNA, 618 bp, Homo sapiens; identical to SEQ ID NO: 334
  unsure (601): n=A,T,C or G

SEQ ID NO: 9374 - DNA, 274 bp, Homo sapiens; identical to SEQ ID NO: 160
  unsure (182): n=A,T,C or G
  unsure (211): n=A,T,C or G

SEQ ID NO: 9375 - DNA, 242 bp, Homo sapiens
ccactaccccaacaccatcgctgagaaacacggcttcagggacctgcggcagttcatcgacgagtatgtggaaacggtggacatgctcaagagtcacattaaagaggaactgatgcacggggaggaggctgatgctgtgtacgagtccatggcccacctttccacagacctgcttatgaaatgctcgctcaaccccggctgtgacgaggatctctatgagtccatggctgcctttgtcccag

SEQ ID NO: 9376 - DNA, 591 bp, Homo sapiens; identical to SEQ ID NO: 639

SEQ ID NO: 9377 - DNA, 404 bp, Homo sapiens
ctgtgagcctcagagctcctggctgcctgttgctgagtctattagctgctgagccttgatctttgtgtttctaagatttgtcctagtccatttatggatctaattgtcgctcttaatttctttacatcttcttctggaaccaggtctgttttattaatgagaatggcatctgccaaagcaacttgcctagtagcttcattgataaggccatcaggtttctcttctgttaaatgttttaatccatattttgaatccacaatagttatgataccatcaagataaatatcactccctaattcagcatcaacccaaaacatagaagccactgcaccagggtctgctaatccagtggtctctaacagtatgtaatcaaatttccccttcttttgcatcaaattctcaat

SEQ ID NO: 9378 - DNA, 428 bp, Homo sapiens
  unsure (110): n=A,T,C or G
  unsure (117): n=A,T,C or G
  unsure (290): n=A,T,C or G
  unsure (307): n=A,T,C or G
  unsure (371): n=A,T,C or G
ctgcagtaacttttcaccccatcattataccagtgctcatctgactgatgaaaaagaggaaagaataatcatttctagatactgaggttgcgaactagttctgtggcagnggactancataagtggatgtctaagaaatttttcagttcactagactaaaatgttttacaacaaaaagcctccagttagcctcctttctagagtatatgttcagcaatgttgatctcataaaaggaaaaacaaaagatttaagtattctatataccaagtttttgttttgtttttactgnatttattttattgaggntctttatattcctgcctcttcatagtcaaggctcttagtacaggaatattgacttaggaattgngaaaactccttaagtttcttaagttaaggatgtttggcttttttctttaattttttt

SEQ ID NO: 9379 - DNA, 293 bp, Homo sapiens
  unsure (11): n=A,T,C or G
  unsure (38): n=A,T,C or G
  unsure (43): n=A,T,C or G
  unsure (45): n=A,T,C or G
  unsure (67): n=A,T,C or G
  unsure (86): n=A,T,C or G
  unsure (105): n=A,T,C or G
  unsure (111): n=A,T,C or G
  unsure (134): n=A,T,C or G
  unsure (156): n=A,T,C or G
  unsure (171): n=A,T,C or G
  unsure (183): n=A,T,C or G
  unsure (256): n=A,T,C or G
  unsure (282): n=A,T,C or G
ccacacctggngttctggaaaagggagtccagggccantattnangccctgctgtactgcaccctgnaaactgcaccaaaccccanctccgcccccatccacggntcccanaatggtttctggagtccctgcancagacctgtgaggagagggcanggcagggcctgcctnctgcgtccccgngatgacctgggggatgcactgggcagggacagcttcctccatccacacagccctgtgggcaccaacaaggccnctgtgacttcacgcgacagcagtgtnccccagctcag

SEQ ID NO: 9380 - DNA, 378 bp, Homo sapiens
aaagtttgcccttgtgctaaagtgccagtgtatgtatgttatacttgatttggttgtaaactatatttcaaagtaaaccctagtgtaataagttttataactaaaaaggtttaagctgctaaaactatttttaagagatgtgaaatgcagtatgggactatctttttttcctcctctaagcccaaagattaactagagtccctccaaccttatagattgttggctttcacaatcttataacctaggatacaggtagtttcgagtatggtgccagtgatgttttgtttttgtttggtcaaggggtaggtgcaacccaatggaccacttatgcaaaagatgtaaactcttgcataatacattgataacatgttttgccaa

SEQ ID NO: 9381 - DNA, 569 bp, Homo sapiens
ctcagataagctgacatttgagcagagacctgtgctaagtgagggagtgtgccatgaggatatctgggaagagcaccttgggaaagggtcagcaagtgcaaaggccctggggtgggagtgtgcctggcatgcttgagaaagagcagagagaccagggtggctggagtggagtgggagaggggtgaacacataggaaatgaggttcagagggtagatgggggccagatcaggaggccaggtgttaactgtgagcaaagtgggagctgcaggaggagtgagagcagaggacagatgggatctgatttgggactgggaaaggcagagaggcttgcatggcagtggggcccatgcctgccttctggtcagagtagatttcggggagggcctgagggactcctcaggtcctgtgccagcctgggcccccaagaaggcagagctaggggtgaaggctggctccccttccgggaggcccgcaggcagcggtcgcttgtccaggcaggaggatgttctcactgactcggaggaaacagcgtgtcccacatcaaaagggggccgggtggctcccacgc

SEQ ID NO: 9382 - DNA, 188 bp, Homo sapiens
ctgccccgaggccaaggctgcgctgaacatgcccagggcctgctggaactggggcgaggtcagggtattctggatctcatccgcggtctgcggcagcgactccccagatggcaagcagggaagcaggcgctcctggacatccgcgttggcgaggatgggagccattatctccggcgtcagcacactgg

SEQ ID NO: 9383 - DNA, 267 bp, Homo sapiens; identical to SEQ ID NO: 4373

SEQ ID NO: 9384 - DNA, 349 bp, Homo sapiens
aaatcgaaagatggtgtggcttcattaaaaacagtagtgaccaagtcactagcttgatctattgttaaaacattgttgtttactcgattaccaacttcaatatgtacatcagctaatgatgatataagttgtttacattcattctgcattcgtgtgaatggaacggcaatttcgtcataatataaatgttctgaaaggatatcaagtaaacgcggctgcacagctaaggtaacagctttacactccttttgtaaagcagcccattcacagattaccaaagctacactaatcctctgtaaagcagacttggagttcaaatggaagagtagtaactggcccagggattcag

SEQ ID NO: 9385 - DNA, 181 bp, Homo sapiens
gtgtccatgtacctcttccgggtaacagtgaccagtgactcccccaagctctggatcctggtattgggagctgtatttggtttctcctcgtatggccccattgccctgtttggagtcatagccaacgagagtgcccctcccaacttgtgtggcacctcccacgccattgtgggactcatgg

SEQ ID NO: 9386 - DNA, 301 bp, Homo sapiens
ccagacttggtgctctccatagagcagtctgggattatcttggagagctgcacgatccagttgttgatcttgtctcggcggcgacgctccacttcattatgctgagccctgcgtttctcatcccgagtcgtccggggagcttctgacttcggggaataagggtgagtcctaggggcaattgagcgctggcttcctccctgcagtacttcttgtggtgacatcatcacaaagaattgaccagtgccaggaggggtcgcctgccccagcagtgcctctgagccctgggtagtaacaacagcag

SEQ ID NO: 9387 - DNA, 531 bp, Homo sapiens
ctgctccatgtccttcacctctgccagggcctcatcccggagaaggcccatctgctcgtggttgtagaaggggcaggctgcctgcttttcctgcctcctcctctttggcttctcctcctcagctcctttcttcttctctgagggtggcacaggcacaaagagagaaaacagagaggacagcaactgtccacgggcccgagagggggttgtgtaatgttgagacccacttccacagggtggggtctataagaccctcccaagtactgcctactgtgtctcatcggaacactgtaaggttttacttttgttctccagaaagagcccgtaaaatcatctccaagccaacgattcggaccagacgctcacccagagagtaggaacactttttcccaaggagaggggactcaggaaggaactggggtctcctctgccattctttctatgaaagacacttaatggtcttcagtcactgccacccctgcctcactctctccagaccacctgcggctacaccatggtcctggtggctac

SEQ ID NO: 9388 - DNA, 289 bp, Homo sapiens
  unsure (56): n=A,T,C or G
  unsure (79): n=A,T,C or G
  unsure (90): n=A,T,C or G
  unsure (147): n=A,T,C or G
  unsure (156): n=A,T,C or G
  unsure (187): n=A,T,C or G
  unsure (197): n=A,T,C or G
  unsure (205): n=A,T,C or G
  unsure (206): n=A,T,C or G
  unsure (213): n=A,T,C or G
  unsure (222): n=A,T,C or G
  unsure (226): n=A,T,C or G
  unsure (227): n=A,T,C or G
  unsure (234): n=A,T,C or G
  unsure (281): n=A,T,C or G
agtgctgaataaatctcttgctgaacaaagacagcatgaggaagcgaataaaaccnaagatcaagggaagaaagggccnaacaaaagctngagaaggaacaaacagggtcaaagactctaaatggaggatctgatgctcaagatggnaatcagccncaacataacggggagagcaatgaagacagcnaagacaaccntgaagccnncacgaanaaaaagccntccnntgaaganagagagactgaaatatctctgaaggattctacactagataactaggntgacatac

SEQ ID NO: 9389 - DNA, 375 bp, Homo sapiens; identical to SEQ ID NO: 161

SEQ ID NO: 9390 - DNA, 389 bp, Homo sapiens
aaatgtataaataatgtgtacctgtgcacataaataattaaatggggagagagaggaaagaaaaagatagaggagaaaactaaagtgctgtccttttgaagtcaacattacaagtacatgagattcctgtgttaatttaaggaagactttcctgttggtttgttgaatgctctgtgtttcctctgtaatgctttcttagctctttctattgtttcctcaggcattatttcattttcccagttactgtatatttgtacctgcttctggtatgttaagtcctttatcttctggcatgaaccacttgcccattccatcagtgtgcactgcttcttccagtgtcctacgtcaagtgttcactcagagacgcttctattctcatttccagttgg

SEQ ID NO: 9391 - DNA, 269 bp, Homo sapiens
aaacctcacttaatggatgtagtatatacctgggcaactggagctacatttgcccatatctgcaaaatgacagatgtctttgaaggcagcataattcgttgtatgaggcgcctggaagaattgcttcgacaaatgtgtcaagcagcaaaagccattggaaacactgagctggaaaataaatttgcaggaggaatcaccaaaatcaagagagatattgtgtttgctgccagcctctacttgtagagtcagctaaaggaatgtgagatttt

SEQ ID NO: 9392 - DNA, 571 bp, Homo sapiens
cggaatatgacttggacaatctttaccagaagccatccgtaagcccctcagtcacactttccatgtagctgaccagtgactacaggatgtggctgacagtgctcactgaaaggagagttggtgcgggactggtggttctgagcacatagacgcctattagtccttctggtcagtgaacgaaaattctagacctacagttactggctacttgcatttgtcagtttagagaaaaggtaaaatgaggcgttttcaattgtagaatagactaacatttaccacagaagtgcttcagcattctaaatggattagatcactcattaagctatttttatatgccaatttactaatgccttacatcaatccactaataggttgttgggcccgcagtagagtccctatgcagtcccaattctgttttctgtaaccatgtgactggtgatgcagagtgataaccatgtctgcctatcttgtactagactcttcatgctgatcggatcttgcattgaaataaccatgtggaagaacaatgaatcgattaatgatgacatgtacaaccatatttacctcggcc

SEQ ID NO: 9393 - DNA, 265 bp, Homo sapiens
ccagggcctttgcaaacaagccaggccaaaaaggctcaacatttacaccggctgctttaatgagggcattgatcttatcctccgtgactgtcacctcatcgtcgtgcagaatgagggccgagtagatgcaggcgagctcggagacagaggccatggcgcgggcgagtgtagggctggcgctgccggacgcggtgctagtcgccggatgaagtgagggcctcaccccaacgcagccttagcttcctcggaaggaccgagcaccttg

SEQ ID NO: 9394 - DNA, 466 bp, Homo sapiens
aaatgagggcaacaggagatcagagatgccaagagatgttggaaaacagaactggctgaagaaatgacaactgaataaagaggggtgaagggagctgtgaaccacagcaatgccaagagggcatccagccaggcagagtggtctactaggcagagcctcagagaggggaggagttcaccagacccacgtgccatatgggattcatgccagccttgagtctacaccagtgaaaaaaatcagagagttcatgactgaagcaatatgccccagaaataatatctttgtattctgacacttcagtgggttcccattcaatcaccctacagggaagactgccagtagacctgccccccaccccgttcaatatgaatagatctaggatcagaaattggagaaaggtgaaagtggggaaacagaccaagatgaccaaatacaaaaggagtccagaacaaacaagtaatttttt

SEQ ID NO: 9395 - DNA, 392 bp, Homo sapiens
acgaggtcctcctcgctctggccgctcttgctgctcctgtctgaagaaatcagactgatttcctcttaagactcctagggatgtggtgaagagctgggactcaagtgcagtccacggtgtgaaacatgagggaggtgaggtgtccgtccacttcccccataaaggtgtgcatttcagttaggctgccccgctacagagcaggcttcatctgctctgccatccagccccatctggatgtgaggtggggtggagacatcatggggtgattgcagaaagggggagtggcggcccacgcagcttctgctgaggagctgaccgctctgagctgttctgtttcgtattgctgctctgtgtctgcatgtattgtgaccgtgcggctccacctcttccag

SEQ ID NO: 9396 - DNA, 459 bp, Homo sapiens
  unsure (14): n=A,T,C or G
  unsure (43): n=A,T,C or G
  unsure (44): n=A,T,C or G
  unsure (167): n=A,T,C or G
taattgaaatcctnaaaggaatgcaagaattgggagtacatgnntgatcaggaaacatatacagattatgtgattccatgctttgatagtgtaaactcagcacgagccattttgcaggaaaatggatgtctgtctgatagtgatatgttttctcaagctggattganaagtgaagcagcaaatgggaacttagactttgtattatcatttttgaaatcaaatacattgcccatctcgctgcagtctataagaagtagcctactgctaggcttcaggaggtctatgaatataaatctttggagcgagataacagaattgttgtacaaggatggacgttattgccaggagcctcgaggaccgacggaagctgttggctattttctttataacttgattgacagcatgagtgactcagaggtacaggccaaggaggagcatttgagacaatacttccatcag

SEQ ID NO: 9397 - DNA, 216 bp, Homo sapiens
  unsure (49): n=A,T,C or G
  unsure (50): n=A,T,C or G
  unsure (56): n=A,T,C or G
  unsure (103): n=A,T,C or G
  unsure (132): n=A,T,C or G
acatcctaatatatggatcttgatttttaagtttcagtatctgaacttnntaaatnagtaacttttagctgggaaagtatagcatgaaaccagaggttctcanaatgactgtaagatagcttacatttcctntttttgcgcggtgctagtcgccggatgaagtgagggcctcaccccaacgcagccttagcttcctcggaaggaccgagcaccttg

SEQ ID NO: 9398 - DNA, 305 bp, Homo sapiens
aaaacaaggcttggcaccctggcttatgcctgtaatcccagcactttgtgaggccaaggtgggcggatcacctgagctcagaagtttgagtccagcctggctaacatggtgaaaccccatctctaaaagagtacacggtcctagagcagtggtgtgcgcctgtagtcctagctacctgggaggctgaaccaggagaattgcttgagcctgggaggcagaggttgcagtgagccaagatcgcaccattacactccagcctgggtgacagagagaggccctgtgcccctcaaaaaaatgtttttttt

SEQ ID NO: 9399 - DNA, 327 bp, Homo sapiens
cctggaagcccacggggtgcagcatcctcaagcccaggggcgggagcgcctccggcctgccctccagggaagctgcatgtggacctccacggtattcagcctccagtttagtcagccttgagtctgggctgctcccgcacctggtgttttatgcgtgtgatatatgtgtatccatcctgcttccctgccttcaagggaagacttaactctccgagagaaaacctgcctggagctgcgcacattctcacagcttgagaacgcttgacgcaggaagtcaccagagtactcaagtcaaccgcaaactagtggttacaaaatgggagcttt

SEQ ID NO: 9400 - DNA, 457 bp, Homo sapiens
ctggctttcagagcctttccctgccttctggggccctgtgatccctcatgcctacttctttctctcttggtcagccttgtgcgcatgccctctcactcttcatctcttgggcctgtctctgtttctccttggatgttcttctattattcccctctctccatcctccataaataaataatttaatttttttgccttcataaatagtcccctccctgcctctagtcatcccccaagctcctccatgtgcctgctcttcctctgtgtgtggatctaggccccacctagctggtgggacagaccaacagctttgggctgggaattcctaggcaggcttgaaatcctcagccagacagacatcagggatggttcagggaggtgtggtcccctgggatgcctagaattccttctttgaaagctccggtgacttgatcagggaagacttgagctgttggaatgg

SEQ ID NO: 9401 - DNA, 288 bp, Homo sapiens; identical to SEQ ID NO: 162
  unsure (249): n=A,T,C or G
  unsure (256): n=A,T,C or G
  unsure (262): n=A,T,C or G

SEQ ID NO: 9402 - DNA, 153 bp, Homo sapiens
ccatggatgccagccgcttggcatccaggtcaaaggcaaagatccttggttcttcagaagagcagccaagtgactggtcttattgcctggggcggcacaggcatcgatgacatgggagcctggcgggggtccagcagcatggctgggagacag

SEQ ID NO: 9403 - DNA, 297 bp, Homo sapiens; identical to SEQ ID NO: 163

SEQ ID NO: 9404 - DNA, 382 bp, Homo sapiens
ggcttcttgcaggccaagcccgagaaggcagcagtggcccagaagccccgaagccacttcacgacacctgcccctatgtccagtgcctggaagacggtggcctgcggggggaccagggaccagcttttcatgcaggagaaagcccggcagctcctgggccgcctgaagcccagccacacatctcggaccctcatcttgtcctgaggtgttgagggtgtcacgagcccattctcatgtttacaggggttgtgggggcagagggggtctgtgaatctgagagtcattcaggtgacctcctgcagggagccttctgccaccagcccctccccagactctcaggtggaggcaacagggccatgtgctgccctgttgccgagcccag

SEQ ID NO: 9405 - DNA, 297 bp, Homo sapiens
aaattccaaagcactcacaaaattgagcaaacaaagccactatttgcatatttgggaaaggaaacatattgctaatggaagccacaggactggtacacaggccccactccctccagctccattcccaagcacaaaattcaacagacccagatcctaagtcaaccaagtgactgctatgacaaaggcttgggttattgacatttacttacatacgtgtacaagacctagagtttgaaaataaatggagaattctaccccaaagcctccacctcagtgaagacctgcgggttattgcag

SEQ ID NO: 9406 - DNA, 342 bp, Homo sapiens; identical to SEQ ID NO: 306

SEQ ID NO: 9407 - DNA, 230 bp, Homo sapiens
ctggaggatcccggggcagggacacctagcccggtgcgtctgcatgccctggcagggttccagcagcgagccctgtgccacgcgctcactttcccttccctgcagcggctcgtctactccatgtgctccctctgccaggaggagaatgaagacatggtaccagatgcgctgcagcagaacccgggcgccttcaggctagctcccgccctgcctgcccggccccaccgagg

SEQ ID NO: 9408 - DNA, 512 bp, Homo sapiens
cctcctgctgtggactgctcttcttaggacaacactggctccacacaagtcagcgaggatggggtcatctttagtcaacatggtttcaggtgtaagttctcaggaagtgtttgttgaatgcatgagtggacaaaggggaggacaatgaaatgagacggaattccgtgtgtttcctgggcagttggtgcaggtgttcctctctcaggaatcacagcttgttaaaggtcatctgcctgctatggacaggggctcccatgactcgtctggaactgtatcacctcccaaagcctggtgatttcaggctcattcttggggtagacaccacctcctgagtcccttcctttggttaccctgctgtccaagggccccacgttggggtgcctactcacccaggtccatgtttcgagtccgggggttacactgcttgtaacccttgcagctcctcagctccatgagctgtacgtgtagctggttgaggacatccctgtccagtgtgttcactgcattcatca

SEQ ID NO: 9409 - DNA, 308 bp, Homo sapiens; identical to SEQ ID NO: 4688

SEQ ID NO: 9410 - DNA, 300 bp, Homo sapiens
aaaaagcaagttactgtccagccaggtagtcggacacggaccaaagctggcagaggaagaaggagaaaattctgaatttctagggtccaaaagttgacaaaaccattagtaggaggggtgggccatgttcattaagccatagtggtccctagttcattgttgagcaagttttagccctgcagttttcaccaccagcacctacccagcattctggtttttatgttttttatgatctatgcagacaactgtgtattctgttttataacagtttgtttgaatttacttacagttaaaaaattt

SEQ ID NO: 9411 - DNA, 75 bp, Homo sapiens
ccaggatctcggcgcatagaccactctgccccagcggtcgtcacagaaaggtctctctgttccccacactcagca

SEQ ID NO: 9412 - DNA, 335 bp, Homo sapiens
cctgatggctggaccctgctcactgctgttgtgggaccctgaaccctcccttcaccttgcttgcctcctgcctcggaagctccttgggtgtgggtgaagcccgaggctgctcctgtggaagtggctctgggcaccagcctgtggggctaaagacttgacagctagctctggagcagccggcttcctggaaaacctccaggtttcgcataccagggatggcccctggcttggcctgcgaaggtgaacctgcccagatttatcagtagaggctggactccctctgtgtcctgcccatggttgcagcagccatgggcctatgagcggtctaactgtgg

SEQ ID NO: 9413 - DNA, 551 bp, Homo sapiens
ccagccagtgacagaaaaaagagtgaatgtgcctttaagaagaagagcaatgagacacagtgtttcaacttcatccgtgtcctggtttcttacaatgtcacccatctctacacctgcggcaccttcgccttcagccctgcttgtaccttcattgaacttcaagattcctacctgttgcccatctcggaggacaaggtcatggagggaaaaggccaaagcccctttgaccccgctcacaagcatacggctgtcttggtggatgggatgctctattctggtactatgaacaacttcctgggcagtgagcccatcctgatgcgcacactgggatcccagcctgtcctcaagaccgacaacttcctccgctggctgcatcatgacgcctcctttgtggcagccatcccttcgacccaggtcgtctacttcttcttcgaggagacagccagcgagtttgacttctttgagaggctccacacatcgcgggtggctagagtctgcaagaatgacgtgggcggcgaaaagctgctgcagaagaagtggaccaccttcct

SEQ ID NO: 9414 - DNA, 134 bp, Homo sapiens
  unsure (85): n=A,T,C or G
  unsure (119): n=A,T,C or G
ccttgacaattaggcagggagaagacctggatgtccatcccatctgataccctgacttcccaagagaacaacccattcttctcanatttctcccaagtccctcattgctgggcctggangctcgctttggctcc

SEQ ID NO: 9415 - DNA, 210 bp, Homo sapiens
  unsure (170): n=A,T,C or G
  unsure (209): n=A,T,C or G
cctgggatgcagggagaaaggctgaccacaagttgagacaagatacagaaacaaacaaaaacaacagaaagtccgatcgatggtgtaagtgttgtgttcactgcttagggtgcaggtgagcttgatcgaggctcccagcaaggcagatgtagacgggggctgagtcagcncaggcagagcacagagacctgtggagaaaatgaagggcng

SEQ ID NO: 9416 - DNA, 206 bp, Homo sapiens
  unsure (174): n=A,T,C or G
  unsure (193): n=A,T,C or G
aaacttttgagttgtagtcagaaactgttgttggactgcatagttttcaaaagtttttggtacatttctgactttagaaatctggggtaggaatccctttccatatgcatatagactattttctgagcttcttcaaaacatgtttcagtgggttcctgaatgttcctgatgatngtctctcttgtcgaactgncaatgttaatctc

SEQ ID NO: 9417 - DNA, 188 bp, Homo sapiens
aaattcaccaacaactgggttcactgccaacaactacaaatgttcaattctgtattagtgtacatgtcattacagttggtttagatggttaatataggaataaataaaataactacagttcaaacaaaggaaattaaaatgagattaaagagccccgatcaaaaaaaaaaaatacttacaactttcag

SEQ ID NO: 9418 - DNA, 618 bp, Homo sapiens
  unsure (590): n=A,T,C or G
aaactgtaatagttctttatattcaggtaaattcctatacatgataggaatactttcgtcatctgatgcatcttcaacagcagtgttcatgtggctatgaaaacaagatcggtcatcatcttcatccatatacactggcggttcatgtgaagtcatgaaagtggaaggcttaaagagatgcttattaagagggtgctgtcgtctgcttgttgaagactttttggagtatatatataagtttggtgttctgcctggtactggaatgccagctttagttagctttatgaaatacttctgtactcggctggcaacctgttttgctgtcctgttgcccaattcatctgctatcttctgccagcgtcgagattctacttcttcaggagggtatttgatgagtagctgttccagctttttctgttcttcaacagtccacaactggttaaatgtttcaggtttggtatcatcacacaagcgtcctcttatcatctgaggacgactgcttgagccttctggaccatcactcaaaggcaacatagaatatgaaagggactctccatccttcttaggatctaaaggactttttggtctancaggtaaacctactttatcaaaaactgg

SEQ ID NO: 9419 - DNA, 259 bp, Homo sapiens
ctgtgtggtcctgagctgtcacctcttccctttgaagctcaggttcctcatcggtaaaatgaggcagaaatactcactgctgagatgtgtgaggatcgcacaaactcagtgtctcaacatgttgtacgtgtgttttggccctctgagcccttgagggctgccccaggtggaaccctcttcacttttcttggagaactgaccatgggttgcagcaaagcctaaaatggttcctgtttcagccctgcctgggaagattcag

SEQ ID NO: 9420 - DNA, 395 bp, Homo sapiens; identical to SEQ ID NO: 164

SEQ ID NO: 9421 - DNA, 464 bp, Homo sapiens
  unsure (15): n=A,T,C or G
  unsure (17): n=A,T,C or G
  unsure (19): n=A,T,C or G
  unsure (121): n=A,T,C or G
aaagatactggattntncnaagatttctgatttacactgatatttttttttgccattcttaattgcatcacacaatagatgtaaatgaagatgtagtcacctcagataaaattggtatcgngtatgataatattgtatcatttatatttgccttatgttaactttaagaaattgatttttttgtattaatcattttcccattgcaacagagctatattttttctattttaagaattatattttaggattatttttggcaaatacagtgagcacttatgtaaccagatgataatgaactcaaatgtcatgatggcttgcataaatggtgactctagtagatttgactcaagcacttctagaatcatgcactgaattcaaaagaaaaatcttgctgctttttgtccagggcttgttctattcaacttctaatttgaaagctgtacaaagtaatagaagttccattt

SEQ ID NO: 9422 - DNA, 347 bp, Homo sapiens
ctgggttggcacaggctttctccacttctgggcctacacagtccttcaagaacagaacatccttgcccagcagagatttgagttctacagcaactggctctaaggagtacttgtcaggcatgggcacaccatcaggccggcctaggtggctcataaggactaccgacttggctccattgtccaagcagaatttgatgcttgggacagcagccttaatcctctggttgtttgttatctggttgttcttcataggaacattgaagtcgactctcataacgacccgcttccctttaacgtccagcttgtccagcgtcagcttgttagaaagcgacattttggaaatacag

SEQ ID NO: 9423 - DNA, 310 bp, Homo sapiens
aaaggatggcctggcccccagtaaacgccgattcctgctcgcggccttctacgcccattactggagcagcagccatcagtgtagacgacgacgaagtctcccatgtaggaaaacgtgtctctgctaactggaggcgccggctccacgctcggcttcatgtgctttgcatacggctctgcgctttcatgtccatctccatccagtggctcacggagtcgcttgctggctttcgcctccgattcttgtccatgttgattttcatgcccttctgaaacttccgggcttgcagatttcctgacaaaggcccagg

SEQ ID NO: 9424 - DNA, 332 bp, Homo sapiens
ctgcgtggagtgacgggaggagggaatcactgtgtgtgcgagagtgcttcagactcaatttccaaaataattttcacccctctaagcatgtaaatatacaaagatggatccttcatagaaattaaaaaatcaatttgagctcatttcgaatacagaacaagtatggcacagatggaagtcctgccacgtttcctttaatgatgctgactcttgtatcacacaggccagcatgaagtttcttactcagactttacaggcattttccgtaattcaatcagtcctgctcccagcacaacacaggaggtgattcaagaataatcgcgagaatcagg

SEQ ID NO: 9425 - DNA, 332 bp, Homo sapiens
  unsure (10): n=A,T,C or G
  unsure (13): n=A,T,C or G
  unsure (14): n=A,T,C or G
aaagaactanttnntaaattatgacacaaaattttattaacaaggaaatatccattaattgactactacagtaaaaactttataatgcttgtatcatgaagaaagaccttccttttccttatatattaattgaactacataggcttgctgtacattttgttattcatgttataagaattctagattccattgcttttgaaatatgtttctttttaggaactaaaagtcaacttatagtttgatttctgttttatttgtactgtgtttctgattttgtgggtttctaaataaaaagatcaaacccaccactttcaatatactgttttctattt

SEQ ID NO: 9426 - DNA, 292 bp, Homo sapiens; identical to SEQ ID NO: 29

SEQ ID NO: 9427 - DNA, 299 bp, Homo sapiens
ctgtcagcaggaagaagtcagtctccactgcctccacagtctccactgccacgctgtcagccgtgggaacaataaaaagcagccccagaatgtgaagtcagtctccactgcctccacagtctccgctgccacgctgtcagccgtgggaacaataaaaagcagccccagaatgtttgctgctgtcgtgcatggacgacaccattgcacataaaagcactagtgctccattattgcagttgggcctcctgaaaacccctagagctggagagggcaagggagaggcttcctctgatcttcag

SEQ ID NO: 9428 - DNA, 377 bp, Homo sapiens
cgtccagcgagccgccgctggatgctaagtccgatgtcaccaaccagcttgtagattttcagtggaaactgggtatggctgtgagctcagacacttgcagatctcttaagtatccttacgttgcagtgatgctaaaagtggcagatcattcaggccaagtaaagaccaagtgctttgaaatgacgattccacagtttcagaatttctacagacagttcaaggaaattgctgcagttattgaaacggtgtgaagacggattctttggttgataaattgctatcattctaaagtcatggacttcactttcggcaacaaaactaaataaggatggaacatttattgaatgaaaaatgcacttttgtttttccattttttt

SEQ ID NO: 9429 - DNA, 487 bp, Homo sapiens; identical to SEQ ID NO: 6908

SEQ ID NO: 9430 - DNA, 409 bp, Homo sapiens
ctgcaccatccccgttgccacgggccgggaaaaaaccaacgacaccactgaagacaactccagttgcctctcaacagaatgcttcaagtgtttgtgaagaaaaacctatacctgctgaacgccaccgagggtcaagtcacagacaagaagctgtgcagtcaccagtgtttcctcctgcccagaaacaaatccaccaaaaacccatacctctgccaagatttacagaagggggaaacccaactgtggatgggcccctacccagcttttcatctaattccactatttcagaacaggaagctggcgttctctgcaagccatggtatgctggagcctgtgatcgaaagtctgctgaagaggcattgcacagatcaaacaaggatggatcatttcttattcggaaaagctctgg

SEQ ID NO: 9431 - DNA, 619 bp, Homo sapiens
  unsure (522): n=A,T,C or G
ctgggacttgctggtaccagggtcgccacacagcaagatgttgatctcagcccgaaatttgccccttccagtgtgactaaaatccttccttgtcccgccaaagagctgaagcaaaattcccttctttatatcttcatgttcataaatgcttggagccaaggctgaagcaagcctctcataaatgtctggtttcctggaaagttccttaagcaattccacacgtttctctgaaaaaagtttctgttctgcttcttcatcaaggccatgcagacgttttgcatccgttttccgataatgaatgacatcaatgtgggttttgtggacagacttcacattactcactcttggattgactcgaataggcacagctcgatagatgcctgtaacattcactctgtccccaggctggaccttgtcaacgagatcattgtgagcaaacaggataactgtgtgtggtgtctgccctgcaggcatgtcttccggagactcctgaagcttgatcatctgcttgtcagagaaganggagcggttgtggatgagtgccatgctgtgggtggtgtggcagcgcccgcacacactgggctctgcaatgcggccgcggtccatctccacccgggtc

SEQ ID NO: 9432 - DNA, 333 bp, Homo sapiens
  unsure (224): n=A,T,C or G
  unsure (290): n=A,T,C or G
ccaccctgactgccttctgccgctgagggcgccgctgggcctggcgcaacctgtgcactacccccacgtagcaccagcccatcaccagcatgggcagcaggaatcccgccacatggtagaggaatcgggaggtgaaccaggcatgcgtttctgcttggttctcttgggagaaggtgcaacgtggcagggagttgttgtgatggccttggctgactttggcgaanagaatctctggcaaggcaaggaggaagcccaccagccagatggtcccacaggtgatgtggatgganaggaggcggcggtggcggtaggcatggacggcgtggacaatgg

SEQ ID NO: 9433 - DNA, 476 bp, Homo sapiens
  unsure (16): n=A,T,C or G
  unsure (126): n=A,T,C or G
  unsure (147): n=A,T,C or G
  unsure (254): n=A,T,C or G
  unsure (266): n=A,T,C or G
  unsure (274): n=A,T,C or G
  unsure (277): n=A,T,C or G
  unsure (377): n=A,T,C or G
  unsure (441): n=A,T,C or G
  unsure (465): n=A,T,C or G
ccactaggaagcttanatccacacatacgcccacttcctggctcttggtttttccttgtccttgtttggtggccctttcaccttttcttttatgtttttgctgcttgcgatgttgaatacacctcntgagttttccctcaaatgcantttggaacaggatggctctggatgggctgatggatgatttctcctcccctttgtgttctggcctttctaggagggtgaggacaaaatcttcttaatcaacaagcttnactccatctacnagaggaanganagggaggagaggagcagggttgggacaaccgaggaggctgcggcaccccctgccctgctcacagatgaacaggatgcctagggggacggcgatgggcctnacgggcccgcccagcaccctgagaccacactgttgcctcccagtgaccctgctgggacaccagnacaaggaagacagtttcgcctctngaaagccgcag

SEQ ID NO: 9434 - DNA, 348 bp, Homo sapiens; identical to SEQ ID NO: 5566

SEQ ID NO: 9435 - DNA, 469 bp, Homo sapiens
ctggggagggggcctggtccatgtacgtggcgctgccgcccccggcatctgcagatgcgttcacaaactcagggaccacttgcttgatctgtggcttcacgtatccatcaacagctttagcagtagcagactcgcagggaactggtgtgtagtatttggagtatacttcatcttttggccgatcaggaaacacgtagataaggtaattcaagtctcccaagcggtcggctagggaccgaatggagaagtctctggtggtaaaaggcatcagattccaaaacattctttcctgagaatcaaacttccaagcaatggtgatgccgccaatttctgagtcactgaatctcaggaggaaggtcccatctggcttgttaatgagtaggtcatgggcctgttgcttgtttacaaaccccaaaatggccccatcattccaatgaggcttgagatgtttttttaacacttccatcac

SEQ ID NO: 9436 - DNA, 577 bp, Homo sapiens
aaacaaggttctcgaggcaaataaggaatcttgagaatccgtgggcatgcaatgtaacaagtagcactccagatggcgccaaagaataaataggcaggtctctatgataaaagaacaaagggaaagcagtttagctcgattgttgatcaccttcaccaagcgccgtcttgctagaacatatttctgagcagtggagattttatcaacaccagcaggcatcacagactgacacaactcttttatctcatctgggggaagctgctctacattttgtagcttgctgacactctgtcgatgactgtcataatagctgaagaaatcattagcactctgtttcagcaggtagatgataatgcctaaaccaggcaggcgccagtatggaaccactggagcttgggtatcttgccgcggtccatctctattaactgtttctgaaaggctaggagtgaagagacacacagcatgctggaaggtaggggaactctgtaacatgagtgactggcaatattccattacattggcacaaatctgctgcatagccagttcaatctcatctttcttgcttactttatcacct

SEQ ID NO: 9437 - DNA, 185 bp, Homo sapiens
aaatgttccaagtgctaaatttgcaagaaaacaggcactaatttcattgtcatcatctgggaagagttagtgtccaagggaagctcagcgggaagggagggaagtgaggtggggcagggtctggcgctcaggggtctgtggcattgatgatgcttttatccgggggggcccatcctcggtaccag

SEQ ID NO: 9438 - DNA, 271 bp, Homo sapiens
  unsure (184): n=A,T,C or G
  unsure (188): n=A,T,C or G
  unsure (206): n=A,T,C or G
  unsure (209): n=A,T,C or G
  unsure (214): n=A,T,C or G
  unsure (220): n=A,T,C or G
  unsure (225): n=A,T,C or G
  unsure (228): n=A,T,C or G
agggctgtgtagacggccaggttggctggggacccggagtagggctggacattgactccccactgtgcaggatccaggtcaaaggcttccaaggcccggcgctggcacagcagctcaatttcatccaccacctctgctcccccatagtatctcttgccaggataaccctccgagtacttgttgntcanacaggaccccagggcctncancgcanctcggntgcanaanttctctgaggcaatgagctccaggccacgacactggctgtcct

SEQ ID NO: 9439 - DNA, 150 bp, Homo sapiens
ccattcctgcagtgcctgtccttctcctttggcttatgctatcctcagcagcacatgcattatttgtaagcctcccttacccatttgatactacccaatcaagactctagtataaatgttctgtcccttcaagaaaccttccccagttgg

SEQ ID NO: 9440 - DNA, 210 bp, Homo sapiens
  unsure (38): n=A,T,C or G
  unsure (40): n=A,T,C or G
  unsure (75): n=A,T,C or G
  unsure (76): n=A,T,C or G
  unsure (79): n=A,T,C or G
  unsure (111): n=A,T,C or G
  unsure (125): n=A,T,C or G
  unsure (127): n=A,T,C or G
  unsure (138): n=A,T,C or G
  unsure (164): n=A,T,C or G
  unsure (191): n=A,T,C or G
gatccaacctctttgcatcttacaaagttaaacagctnanagaagtaaaataagaaggcaatgcttgtggaatgnncantgcatattggcggcgcacgcctcattacgatncgcctgcttgcttntnctgttcaatcnctgtgaccagaaaaaaaaaaaaaaangatggagggagatgattaaaggattcngtacagactaaagggcttt

SEQ ID NO: 9441 - DNA, 371 bp, Homo sapiens
ccaacatggtgaaaccctgtctccagtaaaaatacaaaaaatagctgggtgtggtggtgcatgcctataatcccagctactcaggaggctgaggcaggagaattgcttgaactcgggaagcagaggttgcagtgagccaagattgtgccactggactccagcctgggtgacagggcgagactctgtctcaaaaaaaaaaagggaaaagaaaatgtagatttccattgtccaaagtgacagcgggaggatgggtcttgagtttctcaggttggagaagcagctccacgaaggtcctgagcttgggtccactgtacatgggacagctccaaaagaggaaggtcccagcactgcatctagtagtgaggcatcag

SEQ ID NO: 9442 - DNA, 230 bp, Homo sapiens
ctgaaagtaaacagaatggattgccagttacatgtatgcctgcccagttccctttttatttgcagaagctgtgagttttgttcacaattaggttcctaggagcaaaaaacctcaaggattgatttattgttttcaactccaaggcacactgttaataaacgagcagggtgttttctctcttcctttctaatatatggagtttcgaagaataaaatatgagagcaatattt

SEQ ID NO: 9443 - DNA, 491 bp, Homo sapiens
  unsure (395): n=A,T,C or G
  unsure (439): n=A,T,C or G
  unsure (464): n=A,T,C or G
ctgagtcggaggacgagatgatccatcctgagggagtggcttccctgctgcctcctgactttcagagcagcctggagagaccagagctggagctcagcagacattcgcccagaaaaagctcctcaatttctgaagagaaaggtgactctgatgatgagaaaccaaggaaaggagaaagacgatcatctagggtcagacaggcaagagcagctaaactgtctgagggcagccaacctgctgaggaggaagaggatcaagaaacaccttccagaaacctaagggtcagagcagatcgaaatttgaaaacagaggaggaagaagaggaggaggaggaggaggaagaagatgatgaagaagaggaaggtgatgatgagggacaaaaatctagggaggcnccaatcctgaaagagtgtaaggaagaaggggaagagatacctanagtaaaaccagaggagatggtggangagagacccaaaacaagatcccaggaa

SEQ ID NO: 9444 - DNA, 530 bp, Homo sapiens
  unsure (424): n=A,T,C or G
  unsure (464): n=A,T,C or G
  unsure (485): n=A,T,C or G
  unsure (506): n=A,T,C or G
  unsure (512): n=A,T,C or G
aaaagatagagccacatggacagaaagatcaatattgccctttatagtggctgctgcggttgtagctccgagactatattggagggggtgaggaaggacaagggggccagcaggtgggggacagcggcagacccctcccccaccccgatgctttggtccaaacaccacctctgagggctcccttgcttgggcttctcccaagattcccatccaccctcagaggacacagctactgcctcaactgggaggattcggaaagcttcagaaggtcagaaggcattggtagagggttccgggggaggctgggactacctccccccggagtgtttgaaaagccaggctggttcaggttagatactgaggtggggatgccagagctccatgctgaggaacagggtagagggtgtgggcttctagcacccangggtctgcccccggcagtggggccgccagtagaaacgcantcgcttctggtaggtgtccangttgcgcttcaggcagaaggncacctncttgtcacaggcacacag

SEQ ID NO: 9445 - DNA, 193 bp, Homo sapiens; identical to SEQ ID NO: 166
  unsure (7): n=A,T,C or G
  unsure (67): n=A,T,C or G
  unsure (102): n=A,T,C or G
  unsure (111): n=A,T,C or G
  unsure (120): n=A,T,C or G
  unsure (129): n=A,T,C or G
  unsure (154): n=A,T,C or G
  unsure (172): n=A,T,C or G

SEQ ID NO: 9446 - DNA, 126 bp, Homo sapiens
aaaaagttttattgtgaaatatttatccatgagtacatataacatagatgtccagtttttcaagttacaaaaagcagacagccctccctttttttttttttttttttttttttttttttttttttt

SEQ ID NO: 9447 - DNA, 187 bp, Homo sapiens
aaattgaatcaaagacgtaagatatctctggaatctgaaagaattccaaaaaatagcacagagaaaccatttgaaagccaaatactttacattaaattggtttcacttgtcagactcccaattccataaaactggaaaatcaatttacccaggagtcagtgtattttactgtgggggaaattacttt

SEQ ID NO: 9448 - DNA, 278 bp, Homo sapiens
aaaaacacaatacttggttctaaccctggagatttcaacagggatgggaaggtaacagccatatacttttagagctgtataggttatcctgacacctctactgaaaaaaacccttgctctaacagcaattggcttcatactcttaaatgagctacctataattttaatacaaatccatgtcctaattctctttattatttttttgagacggggtcttgctccattgcccaggctggagtgcagtggtccgatcttggctcactgcaacctgcgcgttc

SEQ ID NO: 9449 - DNA, 231 bp, Homo sapiens
cctcggccgaggtgtgctttgcatttaggacacagcccggagccgcagaaggtcagcaggagcacgtctggcaccttcagtaccaggctgggtgagagagcccgagaggggggccgggggggcagtcagggccctgcttcgctgcctgggcccttgtagatggccttctccaggccgtccaccacctccctgtattccaggaacgattggtagtgtgtgcactcaaagcag

SEQ ID NO: 9450 - DNA, 332 bp, Homo sapiens
aaaatctgtttggggaacaactcataacttctttaagtaattgatgtcaaataatgcaccctgtacttctggagaacacagcattttcaaaattgctcttttcaatctaattatatcagaaaaatatcttcaagagcttagtatttcccaatttttgatcctgatcctggtaacctttcatcaagatccaagcttatgcatagggttctcatctagacccatctgaaattctatacaaatagggagacatattaaatacaaaggtctgtgtaaattgacttaattactattttacaatgaaaaggaattttattacatctttacatcatttt

SEQ ID NO: 9451 - DNA, 184 bp, Homo sapiens
  unsure (9): n=A,T,C or G
  unsure (10): n=A,T,C or G
  unsure (33): n=A,T,C or G
  unsure (36): n=A,T,C or G
aaagcaganntcacaaagcacattcccaaaccncanctccctgacaggagcttgtgacaccagtgtggcctaagaatgggggatttgacttttgaaagcagaggagggaatttcgggctggatcgcaatcaggacagtcagcatgcctgcagagcacctaggctgtgagaggatggggccaagg

SEQ ID NO: 9452 - DNA, 291 bp, Homo sapiens
ccttcacaacctacgaaactacagttcagatttgggaaagcagccgaaaaaggtgcctaaacgtcgccaggccgcccgagagctgtccattcagcgccgttctgccctcaatgtgaggctcttcctcagagacttctgctctgagttcctggagaactgttacaaccggctcatgggatcagtaaaggatcacctgcttcgggagaaagctcagcagcatgatgagacctattatatgtgggccttggctttcttcatggccttcaaccgagctgcctccttccggccagg

SEQ ID NO: 9453 - DNA, 519 bp, Homo sapiens
  unsure (433): n=A,T,C or G
  unsure (450): n=A,T,C or G
ctgacattatgactatataatgtagttagagacaatttttatcttgcttatagtaaaggttcagcctgccaattgtaaatcattctaatttggcaggcttatttttgacattggaaagggcagaaagcgatttgccccagtagtgtaataggagttatagaccagaggctgaaacccaaactatataaaaaggaattcagtggagggggctttgtaatctccattaatttgtgttgctacttccaggatcaccaaaaattacatgtaattttacatgttaaacacattgaaacataacctatgtttataaagcataacgggcttcccttccagaagctctcctgcttgtcatgaagtgagaacaatgaaaagtcatagcagatactcagtttaactctgtgtagaacctagtagtgtttgagctgttattcanatttgaattcagactgngtgttgtttgcttatggacactgcctgtcgttctgtcactgttaaattaatgagtctataagggttttc

SEQ ID NO: 9454 - DNA, 369 bp, Homo sapiens
aaaggtgctaaaatccattccatagctttgaagtgagaacttacagcccatctgaacagtgaggtttgtacccaggcatactctgaggagggcccaaaggcccagcccatctgggagggacaggcccggaggatggagacctcgcagcatgtgcaccctgcgcagacatttacagacacgcaactcagtctttctcacttggacaacctgttgtgcaaaaacactaggaatcttgaagtgagggagctctgtccacagctcccgtaatggcagggaggagagcagagcccaatgaaccttgagtgaaattaagtgctcgaataaccacataattaaattgtgcagatcagcagtcctagtctggaattt

SEQ ID NO: 9455 - DNA, 282 bp, Homo sapiens
aaagtcatgtataatatttcttgattgggaggaaatataattttatcatcatagttaacagatcttcaagagtaaaaaaaaaaaaagccatcttagtttaaggattagtttatagtgaaattgtaatttttaagaaagctgggcgttctataaaaaccttcaagaacttattaaaaattggtattttttaattctctagaaccacatagtagaatgaataacttgctaattttattcttaaaaacctcatgtttatgttttttgatttgtgtttgtatattt

SEQ ID NO: 9456 - DNA, 258 bp, Homo sapiens
gaggagccgctgagcttgctggacgacatgaaccactgctactcccgcctgcgggaactggtacccggagtcccgagaggcactcagcttagccaggtggaaatcctacagcgcgtcatcgactacattctcgacctgcaggtagtcctggccgagccagcccctggaccccctgatggcccccaccttcccatccagacagccgagctcgctccggaacttgtcatctccaacgacaaaaggagcttttgccactga

SEQ ID NO: 9457 - DNA, 272 bp, Homo sapiens
ctgaccccggcgttcgacctcagccaggatccggacttcctgactatcgccatccgcgtgccctacgcccgggtctccgagttcgacgtctacttcgaggggtctgacttcaagttctacgccaagccatactttctcaggacttcatgagacctgtgttaaatctgcagattaacccttcctggaagaattgtagaaaatggaagtgagcaagggtcctatgatgcagataaaggaatttttaccattcgcctgcccaaagaaacccctgg

SEQ ID NO: 9458 - DNA, 325 bp, Homo sapiens
ctgctgaagactcagtctctcagagagctgtgctgatggagaagccagatgtggtagtagggaccccatctcgcatattaagccacttgcagcaagacagcctgaaacttcgtgactccctggagcttttggtggtggacgaagctgaccttcttttttcctttggctttgaagaagagctcaagagtctcctctggtaaggcagagtcacttgccccggatttaccaggcttttctcatgtcagctacttttaacgaggacgtacaagcactcaaggagctgatattacataacccggttacccttaagttacaggagtcccag

SEQ ID NO: 9459 - DNA, 235 bp, Homo sapiens
gcgacccagcccgcgagcgagatgccggtggccgtgggtccctacggacagtcccagccaagctgcttcgaccgtgtcaaaatgggcttcgtgatgggttgcgccgtgggcatggcggccggggcgctcttcggcaccttttcctgtctcaggatcggaatgcggggtcgagagctgatgggcggcattgggaaaaccatgatgcagagtggcggcacctttggcacattcatgg

SEQ ID NO: 9460 - DNA, 382 bp, Homo sapiens
  unsure (11): n=A,T,C or G
  unsure (72): n=A,T,C or G
  unsure (80): n=A,T,C or G
  unsure (89): n=A,T,C or G
  unsure (95): n=A,T,C or G
  unsure (122): n=A,T,C or G
  unsure (129): n=A,T,C or G
  unsure (131): n=A,T,C or G
  unsure (155): n=A,T,C or G
  unsure (173): n=A,T,C or G
  unsure (222): n=A,T,C or G
  unsure (235): n=A,T,C or G
  unsure (236): n=A,T,C or G
  unsure (237): n=A,T,C or G
  unsure (245): n=A,T,C or G
  unsure (251): n=A,T,C or G
  unsure (261): n=A,T,C or G
  unsure (305): n=A,T,C or G
  unsure (312): n=A,T,C or G
  unsure (321): n=A,T,C or G
  unsure (334): n=A,T,C or G
  unsure (352): n=A,T,C or G
  unsure (354): n=A,T,C or G
  unsure (373): n=A,T,C or G
  unsure (375): n=A,T,C or G
cctttctctanaagtcctgagactgagtactctccagaggctggaggttcgtgcggagtttgtacatgtggntgagcgcnatgtgtgangaaagncccgctggtgttgatctccatcaaggncaagttntncagcttggcatgtgcctcctgcgngtctcacaaagctgtcancagacactcggagtttggctatacgagtgtcccacatatccttgaccanggtccggatttcnnntgccttcnggatgntgtctgaagnatgatttaacaggagcttcgtaagttccatgtagtaagggctgngcattgnggtaaaagnttcttcctttcgntcatgatccctcatcttntncaacttttctacatccatncnctctgga

SEQ ID NO: 9461 - DNA, 228 bp, Homo sapiens
ccaggctggtctcaaactcttgacctcaggtgatccacccacctcagcctcccaaagtgctgggattacaagcgtgagccactgcaccgggccacagagaaagtacctctccaccctgctctccgaccagacaccttgacagggcacaccgggcactcagaagacactgatgggcaacccccagcctgctaattccccagattgcaacaggctgggcttcagtggcag

SEQ ID NO: 9462 - DNA, 312 bp, Homo sapiens
ccattttcttccaataatctgtaggaatgatcaaggggtccacaccaaccctggatccttcaggaagcacactcaccagccagtcttcctgagttggtgtgtccttcagacccatcttcataagtgtccagttgctgtccatttgcttggcagcctggagaaagtagcgcccgtcagtccacatggctgcatgctcttctgtgatgatggctgtgcccgcagagccatcgaatccagagacaaaagcccgccgacagtcacatggagcaatatactcactctgatgagcatctcccgatgggatgatgtagg

SEQ ID NO: 9463 - DNA, 397 bp, Homo sapiens
  unsure (97): n=A,T,C or G
  unsure (368): n=A,T,C or G
cctggtcacaatagggaagcgggggtggctcctcccctagcctgcaggaagcccttggtagcccacttatccaccttctcctgggtgtgtggctcancagccaagtccttgtgcactgggttgggtcccagcatgagcctggtggcctggcgggccctggcaccatggagagcagcctgctgccagtgatggcctggatctccaagacggcctccagcactgtcatgcccttgaccagctagtgctggtacaggacctgggtaacaggcatgtccttgggcgtcactggctcaggggcagaggacgaggttgaggaggaagctggatacccctgtccatggtgggctggggctggaagggtggctcantggcctcgaagtgccgggaggactcccag

SEQ ID NO: 9464 - DNA, 275 bp, Homo sapiens
ccttcttggagcccctgggcaccccgggctactgtggggctgtgggcctgttacccccaggcgcagcagctccctccggctgggcccaggctccactcagtgacacggctcaagtctacatggagctgcagggcctggtggacccgcagatccagctacctctgttagccgcccgaaggtacaagttgcagaagcagcttgacagcctcacagccaggaccccatcagaaggggaggcagggactcagaggcaacaaaagctttcttccctccag

SEQ ID NO: 9465 - DNA, 282 bp, Homo sapiens
ccaggcggtacatattctggtgcttcttagcagccttctggaagagatctcgcaggtctgctttctgcggggcagaagtaaaggggtgaagagtagccctggccctccaggcagacaggaggcagagggggcacctcacccgacgactgtgacccccacatgggcagaggacacttactgtgtgggacccctccatcatggcctgcacaaaggctgtggactcgctggtacaggaacgcacagtctcagtccgcccctcccggaacattctggtcattgagg

SEQ ID NO: 9466 - DNA, 287 bp, Homo sapiens
aaaagacctgatggggagatgaacattgcatctggctgtccccgctttgtggctcattctgttttggagaatgccaagaacgcctacattaaagatgacactctgttcttgaaagtggccgtggacttaactgacctggaggatctctagtcactgttatggggtgataagaggacttcttggggccagaactgtggaggagagcacatttgattatcatattgacctggatttagactcaaagcacatttgtatttgcctttttccttaacgtttgaagtcagttt

SEQ ID NO: 9467 - DNA, 420 bp, Homo sapiens
  unsure (8): n=A,T,C or G
  unsure (71): n=A,T,C or G
  unsure (80): n=A,T,C or G
  unsure (118): n=A,T,C or G
  unsure (174): n=A,T,C or G
  unsure (193): n=A,T,C or G
  unsure (208): n=A,T,C or G
  unsure (209): n=A,T,C or G
  unsure (216): n=A,T,C or G
  unsure (223): n=A,T,C or G
  unsure (230): n=A,T,C or G
  unsure (231): n=A,T,C or G
  unsure (237): n=A,T,C or G
  unsure (260): n=A,T,C or G
  unsure (279): n=A,T,C or G
  unsure (280): n=A,T,C or G
  unsure (296): n=A,T,C or G
  unsure (303): n=A,T,C or G
  unsure (314): n=A,T,C or G
  unsure (354): n=A,T,C or G
  unsure (361): n=A,T,C or G
  unsure (371): n=A,T,C or G
  unsure (386): n=A,T,C or G
  unsure (391): n=A,T,C or G
  unsure (404): n=A,T,C or G
  unsure (414): n=A,T,C or G
ccatgatnccaaacaaccatatacactagttgtattctttaataagcgagtatataatattcctgtgcganttattgaancaacaaaacaatatgccttgggcagaaagaaaaatggngaagagtactttggaagtgttgctgaaatcatcaggaatcatcaacatagtccttnggttcttattgacagtcanaataacacaaaagannccaccanactgaantatgccnntaaagnttcataaagggggaaaaaaaagntcaataccattgcttcagnnactttcccaaagtttntcctttngagaaaaagtnccaaaacttcatattttggattatgaatcatccagtaatnaaatggnagatggagtnagctattgaagtggncatanatttctttttaanaagctcatgnggactt

SEQ ID NO: 9468 - DNA, 308 bp, Homo sapiens
  unsure (276): n=A,T,C or G
ccatttaccagactccgacacaatgggccaccaccagtgtgacagcaggacatcctaatatatggatcttgatttttaagtttcagtatctgaacttcgtaaattagtaacttttagctgggaaagtatagcatgaaaccagaggttctcagaatgactgtaagatagcttacatttcctctttttgcctttatctccccaactaaaatacaatggggaagaagtctgcctatgatctttgaatgagctttttaaggaagaaatattatatattgnttgttaaagtttattgaaataaagaatcattt

SEQ ID NO: 9469 - DNA, 358 bp, Homo sapiens
tcgaattctggtgaaaaaggaagaattgacccttgaaggaatcaaacagttttatattaatgttgagagagaggtaactgtctgattgttagacattattttaccttcttgtataagcactgtgctaaaattgcagacactaggaccatgtcttggtttttgcaataatgctagcagagtacacacaagaagaaaagtaacagcactagattgtaaagactggggtggacctctttcttaatgtccaatgtcctttgtcttaagatttggtgcaatatctcattagacctaacagaatgaagttaatttttataatttctacgttttgagactgggttatgagactggctaagactgg

SEQ ID NO: 9470 - DNA, 172 bp, Homo sapiens
  unsure (70): n=A,T,C or G
  unsure (113): n=A,T,C or G
cctgtgggcctagctacttgggaggctaaggtgggaggatcatctgatcctgggaggtcgaggctgcagngagctgtgatcatgcctggacaacagagtgagaccgtcacttncgctctttctcggccgccattttggctagggcaggttcggggactcggtccgaggcgct

SEQ ID NO: 9471 - DNA, 356 bp, Homo sapiens
ctgagcacaaataattttccagcgccagcacaggtgtgaaaggctcacagacagacacacgcaacatgacacacccatcacttcccaagtccccagcttccccaggaacacagggcttgggctccaggccctgggcagacgaacccacagacagggctcctggttgtcacagcttgttccttggagctctcaggctgccaagggcttcaacatggtggtggaccagggagagtccacggtatagcgtctagctgatttctgccagaggatggggagggaaagagcagacacacccttggttcccgaccctgaatgagggccagcctcagtcccccagcagaagagcaccaggtcgg

SEQ ID NO: 9472 - DNA, 373 bp, Homo sapiens; identical to SEQ ID NO: 167
  unsure (341): n=A,T,C or G

SEQ ID NO: 9473 - DNA, 374 bp, Homo sapiens; identical to SEQ ID NO: 5632

SEQ ID NO: 9474 - DNA, 172 bp, Homo sapiens
ctggccttcctgagacaggctccattcctgttccatttgccttcccggcagccttccctttagtgggtataggttttgacgttctgagttactttgtatcaaagagctaattaaaaatggtccttcaaaaacataaagaaaaacagcttgaaaaatgtacatttctattttt

SEQ ID NO: 9475 - DNA, 387 bp, Homo sapiens
ccttttttaagtgacctgtaactcatatcagtgaaaaagaacatgctataaaaagattccacaaagtgagagcattaagctcaaaggtcctgaggtaggtgtgtttgaggagctggtgtgtagctgctgtataagaagtcaacctccttattttcaggtacatttattattattttaaccccaagcagaattgcctagctgggtccctcacctttacacaatagtcataggatttgactgttatcaaaaagtaaatccactctcagaggccatagatttcctattactgaggttcttcaaaagaatatgtaatcaatttatatagtaattcctaaaaatgagattctaaaatatagtagcatgcagatgaagcatagctaatgcttt

SEQ ID NO: 9476 - DNA, 278 bp, Homo sapiens
ccaccagtgtgacagcaggacatcctaatatatggatcttgatttttaagtttcagtatctgaacttcgtaaattagtaacttttagctgggaaagtatagcatgaaaccagaggttctcagaatgactgtaagatagcttacatttcctctttttgcctttatctccccaactaaaatacaatggggaagaagtctgcctatgatctttgaatgagctttttaaggaagaaatattatatattgtttgttaaagtttattgaaataaagaatcattt

SEQ ID NO: 9477 - DNA, 543 bp, Homo sapiens
  unsure (436): n=A,T,C or G
  unsure (485): n=A,T,C or G
ctctgcactatgtcgggtggcctcctgaaggcgctgcgcagcgactcctgcgtggagctgagccagtaccgggaccagcacttccggggtgacaatgaagaacaagaaaaattactgaagaaaagctgtacgttatatgttggaaatctttctttttacacaactgaagaacaaatctatgaactcttcagcaaaagtggtgacataaagaaaatcattatgggtctggataaaatgaagaaaacagcatgtggattctgttttgtggaatattactcacgcgcagatgcggaaaacgccatgcggtacataaatgggacgcgtctggatgaccgaatcattcgcacagactgggacgcaggctttaaggagggcaggcaatacggccgtgggcgatctgggggccaggttcgggatgagtatcggcaggactacnatgctgggagaggaggctatggaaaactggcacagaaccagtgagtggngagagctctgtcagtgacaaacactcctttggcctgttgaatttgctgaagaacatca

SEQ ID NO: 9478 - DNA, 452 bp, Homo sapiens
ctgaaaagttccagcatattttgcgagtactcaacaccaacatcgatgggcggcggaaaatagcctttgccatcactgccattaagggtgtgggccgaagatatgctcatgtggtgttgaggaaagcagacattgacctcaccaagagggcgggagaactcactgaggatgaggtggaacgtgtgatcaccattatgcagaatccacgccagtacaagatcccagactggttcttgaacagacagaaggatgtaaaggatggaaaatacagccaggtcctagccaatggtctggacaacaagctccgtgaagacctggagcgactgaagaagattcgggcccatagagggctgcgtcacttctggggccttcgtgtccgaggccagcacaccaagaccactggccgccgtggccgcaccgtgggtgtgtccaagaagaaataagtctgtagg

SEQ ID NO: 9479 - DNA, 208 bp, Homo sapiens
cctggagcgtttgctgtgccaggaggcggcagctcttctgggcagagcctgtccccgccttccctcactcttcctcatcctgcttctcttttcctcgcagatgataaaaggaatctggcattctacacctggaccatttgattgttttattttggaattggtgtatatcatgaagccttgctgaactaagttttgtgtgtatatattt

SEQ ID NO: 9480 - DNA, 254 bp, Homo sapiens
gacattattacaccttattaaaacttcacccagatgtccagacaaagctccatctatgtattcttctgtatttgcaagctgcatgttcatgtagccatctacagataccagatagcccttgtactccattccccacttaagtttcaccatcactggctttcctgttagtccattgaggaaaggtttgggattgaggggtaaactcatcgtaaccacggccgaatgttgcaggctactctctgccgaccaggccg

SEQ ID NO: 9481 - DNA, 203 bp, Homo sapiens
  unsure (11): n=A,T,C or G
ctggaccccancacctggtgctcccgtgctgagcccccagaccagtcctttcggaccggctctcccggggatgccccggagaggccgccgctttgcgactttagtgaggggctttcagccccaatggacttctaccgctttaccgtcgagagtccaagcactgttacatcaagtggcggccaccatgaccctgcagggcttgg

SEQ ID NO: 9482 - DNA, 209 bp, Homo sapiens
  unsure (204): n=A,T,C or G
  unsure (206): n=A,T,C or G
gcttcgtggaggttggccgggtggcctatgtctcctttggacctcatgccggaaaattggtcgcgattgtagatgttattgatcagaacagggctttggtcgatggaccttgcactcaagtgaggagacaggccatgcctttcaagtgcatgcagctcactgatttcatcctcaagtttccgcacagtgcccaccagaagtatntncga

SEQ ID NO: 9483 - DNA, 334 bp, Homo sapiens
cctgcttcacttgcagataagtttattataattctccagaaatgtgcaggatgtgcattagcaaattgcactgtacttttcactccagcctgggtgacagagcaagactcccgtctcgggggcttaaaaaaaaaaaaatgctgtatctaaatgaatctgtgtaattgggcccagatgtgggtttgcccagtattagtagacaaggtctttgttcagacgattaggtgcctaactggcaaatgccttagtttcttaaaacgtattttctgatgtggctttacatttcaaaagtgaacttgattcaacctgagaaaactgattaaaaaattagttt

SEQ ID NO: 9484 - DNA, 243 bp, Homo sapiens
ccaccaagtaagaatggttggtgacaagacagaaggctaaaacaggaaggtaatcttgtgcacctgacaaatagaaagaataaaggatcaaaattgaaggcaggctataagagtatcaagaaattcttaaaaaccaaaaagtgatttggaagcacaaaacttacagttaatgctacccaatgtcatgatgggccaagaacattgtggcttcctaagttagaaaatgccatatgccaaaatttt

SEQ ID NO: 9485 - DNA, 466 bp, Homo sapiens; identical to SEQ ID NO: 169
  unsure (447): n=A,T,C or G
  unsure (451): n=A,T,C or G

SEQ ID NO: 9486 - DNA, 423 bp, Homo sapiens
  unsure (20): n=A,T,C or G
  unsure (34): n=A,T,C or G
  unsure (65): n=A,T,C or G
  unsure (102): n=A,T,C or G
  unsure (109): n=A,T,C or G
  unsure (122): n=A,T,C or G
  unsure (208): n=A,T,C or G
  unsure (221): n=A,T,C or G
  unsure (233): n=A,T,C or G
  unsure (243): n=A,T,C or G
  unsure (273): n=A,T,C or G
  unsure (277): n=A,T,C or G
  unsure (341): n=A,T,C or G
  unsure (344): n=A,T,C or G
  unsure (356): n=A,T,C or G
  unsure (369): n=A,T,C or G
  unsure (379): n=A,T,C or G
  unsure (397): n=A,T,C or G
  unsure (407): n=A,T,C or G
  unsure (419): n=A,T,C or G
aaaggtgtgtgtattctgtntgcatctccctgtnactgtgacacacctagatgtgtgttacttcnattaaaattctcaaatttaattttgatttgcttcagnagggacnatcgagcggccgnccgggcaggtccaatgtagctgatgtcgtgagcaaaggccagagggtcaaagtcaaagtgctgtccttcactgggaccaagaccancctgagcatgaangatgtggatcangagactgganaagatctaaacccaaatagacggcgaaatnttgncggggagaccaatgaggagacctcaatgcggaatcctgatagacccactcacttgtcccttgtnagngctcctgaagtngaggacgactcantggaacgcangcgcctcacccgaatctntgacccatanaagtgggagatnaaac

SEQ ID NO: 9487 - DNA, 429 bp, Homo sapiens; identical to SEQ ID NO: 170

SEQ ID NO: 9488 - DNA, 553 bp, Homo sapiens; identical to SEQ ID NO: 171
  unsure (542): n=A,T,C or G
  unsure (543): n=A,T,C or G

SEQ ID NO: 9489 - DNA, 319 bp, Homo sapiens
  unsure (56): n=A,T,C or G
  unsure (228): n=A,T,C or G
  unsure (239): n=A,T,C or G
  unsure (241): n=A,T,C or G
  unsure (292): n=A,T,C or G
aaagtcaatctaccattaaatatacttatcttaaaattcattttgttagaaaatanaattcactttgagatctacttcttcccatattggtttattattccaataaaattcctatattcttgaatatgttttttctttctagttctgaggtatttaatttattactgaactctcttccaaatgatacacatacttgaaaaataatgagaaagaacatcttctagttanaaagattctgntnctagtaacttcaacaacagttatggaaaagaatactggaagttatccagtnaaattataagatgaaaattactatttt

SEQ ID NO: 9490 - DNA, 308 bp, Homo sapiens; identical to SEQ ID NO: 4688

SEQ ID NO: 9491 - DNA, 274 bp, Homo sapiens
aaacaagacacccaaatcagcagcaaaggtacctggggtagtcactgagattttgaacactgggaatgggagggggaaagtccaaaaagtagaagttgggaagaaaagggaaggattgagggagacgctaggctctggaggacagagctgggccgcaggaggtggaagtaagccagtatggggggtacccctcctgactgctgttgcccgtattcccccagaccccagagagccccacggtttgttctgcagtccattccctattccccaaagg

SEQ ID NO: 9492 - DNA, 83 bp, Homo sapiens; identical to SEQ ID NO: 168
  unsure (32): n=A,T,C or G
  unsure (53): n=A,T,C or G

SEQ ID NO: 9493 - DNA, 320 bp, Homo sapiens
aaaagaattaaccattggaatgaatggcatggaaccaactaatcagaatggaagacagccctggcactggagtaggatcatagagaacttctgcttgcttggccttcagcttttaggtttttggatcatggagagtttaaggagtcctgggagagggccagggagcctgcagttgtagcagggctcagggctgtggctttttaccaaatggtacagaaatagacaaattataacccccacatggctgaatcagttcatactgaccagcatgacccaaacccttttatcctaaaggatctccccacgagagtgttttggac

SEQ ID NO: 9494 - DNA, 260 bp, Homo sapiens
  unsure (13): n=A,T,C or G
ctgtggcccccanggctaccctacacaacgccctccccaggcccccctaagctgctctcccttggaacctgcacagctctctgaaatggggcattttgttgggaccagtgacccctggcatggggaccacaccctggagcccggtgctggggacctcctgggcaccctgtccttcactcctttgccccagggacccaggctcatgctctgaactctggctgagaggatgctgctcaggagccagcacaggacaccaccac

SEQ ID NO: 9495 - DNA, 481 bp, Homo sapiens; identical to SEQ ID NO: 173
  unsure (11): n=A,T,C or G
  unsure (17): n=A,T,C or G
  unsure (74): n=A,T,C or G
  unsure (86): n=A,T,C or G
  unsure (122): n=A,T,C or G
  unsure (147): n=A,T,C or G
  unsure (154): n=A,T,C or G
  unsure (166): n=A,T,C or G
  unsure (179): n=A,T,C or G
  unsure (183): n=A,T,C or G
  unsure (221): n=A,T,C or G
  unsure (280): n=A,T,C or G
  unsure (396): n=A,T,C or G
  unsure (410): n=A,T,C or G

SEQ ID NO: 9496 - DNA, 110 bp, Homo sapiens; identical to SEQ ID NO: 174
  unsure (73): n=A,T,C or G
  unsure (99): n=A,T,C or G
  unsure (107): n=A,T,C or G

SEQ ID NO: 9497 - DNA, 430 bp, Homo sapiens
cctagagagtcatatgtctcagttcagaaatctatcgaagtggcagagctggaattcaaacacaagcagccgttctctgctattccaccctggtgtccaagcaacatggtagggcagaaggaagaggatcttacaaagagtaagggaaagggagaggggcagaggctgcttctcagagccaccaaaggacaaaataagacaggtgtgagcccagtggaggaggcacggggcagagaccagccactgttgctggcacgctggtgcacgtagcactgtggcagatggacctggagaggaagcaggagggacagcacaatggagccaagaaaggacttagcatggccgggcgcggtggttcatgcctgtaatcccagcattttgggaggccaaggtgggcagatcacctgaggtcaggagtttgagaccagcc

SEQ ID NO: 9498 - DNA, 403 bp, Homo sapiens
  unsure (291): n=A,T,C or G
  unsure (315): n=A,T,C or G
  unsure (318): n=A,T,C or G
  unsure (356): n=A,T,C or G
  unsure (385): n=A,T,C or G
aaaaaatggtatttcagtatacagtcatccctcgtcatcagcggtgtgtggggcggcgggggcggttccagaacccttcccagatactagaatctgcagatggttaagtcctgcagttggccctgtggaatctgtggattagacaagttggccctccctatctgcaggttccacatccttgaatactctgttttccatctgaagttggttgaagccatggatatggagggctgactgtcgttggttttgttttttttttttttgatagacttcattttttttttttatggnaatattaggtgcatagcaaaatanagnggaatccaagagagttcccatatacttccagtcccctnacacacaagcctccccaactaccagcagnctgcaccagagtggtaca

SEQ ID NO: 9499 - DNA, 530 bp, Homo sapiens
ctggttccgccctatgcggactctgcccatggaacccggccctggaggctcagagggacggggaccagaggaccagggtccccccttggtgtggactgagattgcccccatccggccggaatccagtgattcaggactgggcgaaggagactctaagaggaggcgcgtgtccccctatccttccagtggtgacagctcctcccctgctggggccccttctccttttgataaggaagctggaggacagttttataactattttcccaactgagcagatgacatgatgaaaggaacagaaacagtgttattaggttggaggacaccgactaatttgggaaacggatgaaggactgagaaggcccccgctccctctggcccttctctgtttagtagttggttggggaagtggggctcaagaaggattttggggttcaccagatgcttcctggcccacgatgaaacctgagaggggtgtccccttgccccatcctctgccctaactacagtcgtttacctggtgctgcgtcttg

SEQ ID NO: 9500 - DNA, 146 bp, Homo sapiens; identical to SEQ ID NO: 338
  unsure (20): n=A,T,C or G
  unsure (26): n=A,T,C or G
  unsure (39): n=A,T,C or G
  unsure (46): n=A,T,C or G
  unsure (133): n=A,T,C or G
  unsure (145): n=A,T,C or G

SEQ ID NO: 9501 - DNA, 304 bp, Homo sapiens
cctcaggaaacttacagtcatgacagaaggggaggcaggcatgtcccacatggtggagcaggaggaagagctcacctacagcaaattatttaagaccgagcatttgtctctgttctgttccctctctggacgcaccctcctgcctccaccctgacttgccgtctcctgagcactgaagatatttttggcttgtccgatgtgactccacagacagcagaaacgcttgcttgatcagggcagcatcagggcaccacacatgcctgggcttgcacaacacagtgggagcactgccactcagcagcag

SEQ ID NO: 9502 - DNA, 312 bp, Homo sapiens
aaaaatcctatattaatccttttataagtgaacagtcacttaaaaatctcagctttcataattgggttgattaagtaacttatatctgctgtataataaacatagcgatcacagactatcctttttttccatattttataactctgaaactgagctctttactgttgattatccaaatcttttgccttttttctattagcaccctgcccatttcactactctaatcagccaatcaagagataaaatgagtctgggcttggtggctcatgcctgtaatctcagtactttgggaaaccgaggcaagtggatcag

SEQ ID NO: 9503 - DNA, 421 bp, Homo sapiens; identical to SEQ ID NO: 172
  unsure (342): n=A,T,C or G
  unsure (344): n=A,T,C or G
  unsure (353): n=A,T,C or G
  unsure (391): n=A,T,C or G
  unsure (396): n=A,T,C or G
  unsure (417): n=A,T,C or G

SEQ ID NO: 9504 - DNA, 427 bp, Homo sapiens
  unsure (11): n=A,T,C or G
  unsure (26): n=A,T,C or G
  unsure (39): n=A,T,C or G
  unsure (40): n=A,T,C or G
  unsure (76): n=A,T,C or G
  unsure (93): n=A,T,C or G
  unsure (102): n=A,T,C or G
  unsure (103): n=A,T,C or G
  unsure (112): n=A,T,C or G
  unsure (122): n=A,T,C or G
  unsure (123): n=A,T,C or G
  unsure (124): n=A,T,C or G
  unsure (136): n=A,T,C or G
  unsure (141): n=A,T,C or G
  unsure (143): n=A,T,C or G
  unsure (151): n=A,T,C or G
  unsure (164): n=A,T,C or G
  unsure (197): n=A,T,C or G
  unsure (219): n=A,T,C or G
  unsure (248): n=A,T,C or G
  unsure (271): n=A,T,C or G
  unsure (272): n=A,T,C or G
  unsure (327): n=A,T,C or G
  unsure (376): n=A,T,C or G
  unsure (420): n=A,T,C or G
  unsure (422): n=A,T,C or G
ccttgcctcanatccaaggtcactcngaagaggccatgnntaccctcaatgacactcatggaggaaatgctgaganaagcattcagatgcatnacacaaggnnagactgccnaaaatcttgnnncttgctctcctnatttngntatttgtnttatttttagganttttgagagcaaaatgacaacacccagaaattnagtaaatgggactttcccggcngagccaatgaaaggccctattgctatgcnatctggtccaaaaccactcttcnngaggatgtcttcactggtgggccccacgcaaagcttcttcatgagggaatctaanactttgggggctgtccagattatgaatgggctcttccacattgccctgnggggtcttctgatgatcccagcagggatctatgcacccatctgngngactg

SEQ ID NO: 9505 - DNA, 350 bp, Homo sapiens
  unsure (18): n=A,T,C or G
  unsure (30): n=A,T,C or G
  unsure (55): n=A,T,C or G
  unsure (87): n=A,T,C or G
  unsure (100): n=A,T,C or G
  unsure (105): n=A,T,C or G
  unsure (133): n=A,T,C or G
  unsure (222): n=A,T,C or G
  unsure (236): n=A,T,C or G
  unsure (303): n=A,T,C or G
ctgggaacaactttcttnaaactacctggnggtgaacttaacccaggagaagatnaagttgaaggactaaaacgcttaatgacaganatactgggtcgtnagganggagttttgcaagactgggtcattgacnattgcattggtaactggtggagaccaaattttgaacctcctcagtatccatatattcctgcacatattacaaagcctaaggaacataanaagttgtttctggntcagcttcaagaaaaagccttgtttgcagtccctaaaaattacaagctggtagctgcaccattgttngaattgtatgacaatgcaccaggatatggacccatcatttctagtct

SEQ ID NO: 9506 - DNA, 343 bp, Homo sapiens
ctgtcttccacggtacctgaactgggtctgattttttgaaacattttggaaaagagattgcgtttggaatgtttacatttcatgtgacaacatgaaaacaataaactgaaatgtcacctgaatgtgtagtaggagtctccctgtgtttaagtaactggtgtatcaaattgaatacttaagactgacactgttaaagtacccttgactgcaatagaatttgatggaagatctcagggaagtggaacaaaatcttgtatgaaaaataaggaagtagaaagaaggtctaagtctgaatttcatcccaggggttttcccttttctgaaatgttaagggctcctttgg

SEQ ID NO: 9507 - DNA, 237 bp, Homo sapiens
ccttggcggggctggcacctctgtgtcatgggagactctgtcccaggctctctccctgctgctgggctttgccggccgtctctgctgctcttggcttatggaagcagcaccatcttcacagggcgttctccccacgtgctgtctgtgcccagattcccccttttcatgaggacagcagtcatattggatcagaggcttgcgctactccagggtgacctcatctgaacttgattgcag

SEQ ID NO: 9508 - DNA, 432 bp, Homo sapiens
aaatgtatatggttaaacagccaatttagggaagaggaaataacactatatccagacaagcatgggtgtgtccgggacctgttagaagaatgtaaaaaggccgtggagcttggggagaaagcatcagggaaacttaggctgctagaaattgtaagctacaaaatcattggtgttcatcaagaagatgaactattagaatgtttatctcctgcaacgagccggacgtttcgaatagaggaaatccctttggaccaggtggacatagacaaagagaatgagatgcttgtcacagtggcgcatttccacaaaggggtcttcggaacgttcggaatcccgtttttgctgaggatacaccagggcgagcattttcgagaagtgatgaagcgaatccagagcctgctggacatccaggagaaggagtttgagaagttt

SEQ ID NO: 9509 - DNA, 552 bp, Homo sapiens
  unsure (33): n=A,T,C or G
  unsure (180): n=A,T,C or G
  unsure (353): n=A,T,C or G
  unsure (393): n=A,T,C or G
  unsure (394): n=A,T,C or G
  unsure (420): n=A,T,C or G
  unsure (518): n=A,T,C or G
cctggtctgagcaagggcagccccctgtcccanacacaggcacccccaatctcactttggacagagccaacgtggggggatcctcccgggcctgggcctgtcaagtctgcctgcgggaccctgccattgtgctcaaatcacaaccattttgtgcttccaacatttagggtgcttgtgcantgagtggagctgggggcctgccccctaacatggaccttggacatccctgaaagagtgggcagagaatccaactctcatgaagcacaactcggggtgtctcatggatgttgggctcagggctcctgaaggacttcaagtttagagagtcaatgacacttgccaggacagcaganctggccccgccgtgaggtagctgacccatcagaaacagcnnaaaatgggcatgatgatgagcacctntcgcagggccataagatcacacttcgtgcaagaacacgccttgcagctacagtgcagtcaccccaggtggggcatccccggcccgggggtgggagctnaaggggacagagtcttacgtgtttctatcgcttg

SEQ ID NO: 9510 - DNA, 252 bp, Homo sapiens
cggggtgatcatggacgcttgacaacctgcgggcaggcgccgggaggccgagccagcgactaagaggaccgagaggtggcgtggacagatttcaaggccagagaatggcaggggaacagaaaccctcaagtaatctcctggagcagtttattttactagccaaaggtaccagtggctcagccctcactgctctcataagccaggtcttagaggctcccggagtgtatgtctttggagaacttctggagctgg

SEQ ID NO: 9511 - DNA, 438 bp, Homo sapiens
  unsure (29): n=A,T,C or G
  unsure (413): n=A,T,C or G
  unsure (419): n=A,T,C or G
  unsure (420): n=A,T,C or G
ccacctccccatatcctgagactgacagngttttttttgagccttcccatctgacatctgctgctgatgaaggtgctgttcaagtcagtagaagaaccatttcttcgaattccttctcaccagaggtatttgtgctgcctgttgatgtagaaaaggaaaatgcccacttttatgttgcagatatgattatatcagcaatggagaaaatgaagtgtaacattctgagtcaacagcagacagagagctggagtaaagaagtcagtgggttacttgggagtgatcagcctgactctgaaatgacttttgataccaacataaagcaagagtctgggtcttctacttcttcatacagtggctatgaaggttgtgctgtgttacaggtcagcccagtgactgaaacacgtacttaccantgatgnngcctaatgagtgagctaa

SEQ ID NO: 9512 - DNA, 395 bp, Homo sapiens; identical to SEQ ID NO: 339
  unsure (12): n=A,T,C or G
  unsure (16): n=A,T,C or G
  unsure (21): n=A,T,C or G
  unsure (50): n=A,T,C or G
  unsure (57): n=A,T,C or G
  unsure (76): n=A,T,C or G
  unsure (120): n=A,T,C or G
  unsure (126): n=A,T,C or G
  unsure (142): n=A,T,C or G
  unsure (164): n=A,T,C or G
  unsure (166): n=A,T,C or G
  unsure (173): n=A,T,C or G
  unsure (184): n=A,T,C or G
  unsure (190): n=A,T,C or G
  unsure (218): n=A,T,C or G
  unsure (221): n=A,T,C or G
  unsure (238): n=A,T,C or G
  unsure (276): n=A,T,C or G
  unsure (298): n=A,T,C or G
  unsure (307): n=A,T,C or G
  unsure (326): n=A,T,C or G
  unsure (344): n=A,T,C or G
  unsure (349): n=A,T,C or G
  unsure (358): n=A,T,C or G

SEQ ID NO: 9513 - DNA, 372 bp, Homo sapiens; identical to SEQ ID NO: 175

SEQ ID NO: 9514 - DNA, 292 bp, Homo sapiens
  unsure (170): n=A,T,C or G
  unsure (206): n=A,T,C or G
  unsure (275): n=A,T,C or G
ctgaccatgaaggacagcaaccagttccacgccacctgcctcgacaccttcccgcccatctcttacctcaatgccatctcctggcgcatcatccacctggtgcaccgcttcaacgcccaccacggggacaccaaggtggcgtacacctttgacgcgggccccaatgccgngatcctcaccctggacgacactgtggctgagtttgnggctgctgtgtggcacggctttcccccaggctcgaatggatacacgtttctgaaggggctgcaggtgangccggcccctctctcag

SEQ ID NO: 9515 - DNA, 373 bp, Homo sapiens; identical to SEQ ID NO: 176
  unsure (95): n=A,T,C or G

SEQ ID NO: 9516 - DNA, 247 bp, Homo sapiens
ctgccatgttcacatatcggtccctctcccttcagggtccacagagggaccctcagcggctttctcttctctgtcccagctccccagcagccacagcattcgccagggtgacctcggtcagacggcgccactcacccatcacgagactagaaccaccgcactcccaagacagccttgttccttggagctcaggatcagaagggcaacaaggacacacacatgcacttaccaaggtggctgtgcctgg

SEQ ID NO: 9517 - DNA, 146 bp, Homo sapiens
  unsure (21): n=A,T,C or G
  unsure (28): n=A,T,C or G
  unsure (46): n=A,T,C or G
  unsure (103): n=A,T,C or G
ttcagggatcttgaactgaanaaaatangtctgggaaagaacagtnctggctcaaatgtttcatgttcattaatctatgaaacctttattaaaccagtactgngtatcaggcacatgatttcctaaaggagaaattttaacatttt

SEQ ID NO: 9518 - DNA, 154 bp, Homo sapiens
ccttgttcaaaatccaagctgagggtggcactaattccaattagaatggcaagagtcatgccaaggaccagcaccctaagagtgtttctccccgcataccaaagcatcactgcaatgtgcagaagagctgataacggtaggattttgtaaccag

SEQ ID NO: 9519 - DNA, 329 bp, Homo sapiens
ccatggagaaggaggaaaaagagagtcccttctccagtgaagaggaagaagaagatgtgcctttggactcagatgtggaacaggccctgcagacctttgccaagacctcaggcaccatgaataactacccaacatggcgtcggactctgctgcgccgtgcgaaggaggaggagatgaagaggttctgcaaggcccagaccatccaacggcgactaaatgagattgaggctgccttgagggagctagaggccgagggcgtgaagctggagctggccttgaggcgccagagcagttccccagaacagcaaaagaaactatgggtaggacag

SEQ ID NO: 9520 - DNA, 126 bp, Homo sapiens
ccacttctgccacccccacccctttaagacactgaaacatgccggacagcagattcacaagtgaagagcaggaaacagggtttgaggatagtggttaaccatggctgcattcttctgggagccttt

SEQ ID NO: 9521 - DNA, 215 bp, Homo sapiens
ccagctctgtgggaactatacagggagctgggcctatttcagggcccagcactggggctgaggaaccatttgggaagaaaactaagaaggagaaaaaagaaaaaggcaaagagaacaacaaactggaaggtactttggggagatgatatcagttgccccagtgactcacctactaatgacagttagacctggtactaactgacagacacacacag

SEQ ID NO: 9522 - DNA, 122 bp, Homo sapiens
  unsure (90): n=A,T,C or G
  unsure (112): n=A,T,C or G
  unsure (115): n=A,T,C or G
gatattgttaggatctactagcaaatgatttggtaacctgacatctttgtattcatgtccaaaaaaattcttttataagaacaaaaatgntactcttagcctcattcactgnagnattactg

SEQ ID NO: 9523 - DNA, 286 bp, Homo sapiens
cctagaaaaatgcctggcacagaagcatttactaaatatttgttaaatggatgaataaactatgtgaccagaattccttaatactgggtccgagactagaaagtgggagttactggtttggttttggcacttgtttagtcagcttgtgctgccataacaaaacaccacagatggattggttaacaacagacatttctttctcacaattctggaccctggaaatctgaggttagggaaccagcagattcagttcctggtgagggccctcttcctgcctggcagacag

SEQ ID NO: 9524 - DNA, 518 bp, Homo sapiens
  unsure (496): n=A,T,C or G
aaaaataaagtctccctacttaaaatccagtagatatcatggcactaatgctaacacccctttccccaaattaataaaacaaaaataaaaaaaagaaaaagagaaaagagaaaagcaaggtggttagccctccctcctgaaaaaaaccttacaatggtagtgctggaaaaggaagttgcccttgattaaaaaggtaacaaaattcccacattgtacaaatcggttccagtatagcaagaggtgagggctagggcagaggagcaaactatgtacaaggacccattgaaaacgcagtagtaggactttggcactatgaacaattcccaccggtcctctgggaggtgcgtctgagagtcgctggacttcccgcaccctccaggcacacgcgagctaagtagttccacttggagtcactggcaagggtggcccatggctggggagagaccatctcttctttcttcaaagacggagcgtcccgttgatcagcacagcagtnctaacagacttccctgtctagg

SEQ ID NO: 9525 - DNA, 226 bp, Homo sapiens
ccccctagaggtgtccctgtgcctgtctgctgtccaaggcaagtgccacacacagccttggagttaccccagtgtgtgtctttcctctctgaggctgtcggtgctgatgacaacactgggacccataggtcccagcaactccctgagtgacacatcccctcctgtgcagtgtggcagaggagtgctgagttggcttggacctgtccaacctcgtctggcctcattt

SEQ ID NO: 9526 - DNA, 274 bp, Homo sapiens
ctgattgccaggtgaacatcaccatcttactcctctgaataactagacacaaattacatagcaagttcgagtttctgcccacccaagacacagccagtaatcagtcacaaacacagacacagccaactccaggggctccagctttctgcccatcttctctcagcagttcctcccatctgctaagatgcgccttcctggtggctctctctcaaggtgggtcaaggctgaacaagacagaaaagcacagtctaggtccaccatcacctcccactgg

SEQ ID NO: 9527 - DNA, 376 bp, Homo sapiens
ccaaaggcagctctggcatgctcaaaccctccaacctgtagccgcttcttgaagaggtccagcggatatgtcagggtcttgctgatgacaccagctccactgccacaaagcaggttttggaggttctcatttttctttccttcggctggtatggcccacttgtacaggtgcttcaaggagctgtagcaagagaactgcagcccggcgtaggggaagatggcgatcaaggtgggagccaagcctttgtagaaaacctgggggccttcgctcctatacatggtccccacggcgtggcgcagcgtattatagaccttgggctcaccctgagctgcaaagcgggtgcgcagaacatccacggggtgcacagtgagggtgg

SEQ ID NO: 9528 - DNA, 220 bp, Homo sapiens
ctgggggatgttactgccttgtgccagttccccaagctcgaggaactcagcctggagggcaaccccttcctgacggtcaatgacaacctgaaagtctcctttctcctgcccacgctccgtaaggtcaatggcaaggatgcgtcctcaacttactctcaggtggagaacctgaatcgggagctgaccagcagggtcacagctcaccgggagaagttcatgg

SEQ ID NO: 9529 - DNA, 425 bp, Homo sapiens
  unsure (10): n=A,T,C or G
  unsure (12): n=A,T,C or G
  unsure (94): n=A,T,C or G
  unsure (173): n=A,T,C or G
  unsure (348): n=A,T,C or G
  unsure (382): n=A,T,C or G
gaggtagggntngcaatgagctccacccttcagccatgtcctgcaaccttccccgggcccatagtgagggtgccaccttactcccagcctccangggctctgcctgctcctgccctgtcccccgcatcctatgaggcatgggcgtgggtgggcacagcatactgtgcgtgtgngtgtccgtcacaccttgctcgggacggaaagattcccacacaggaataaggacccgtggccctcatgggggaaggacagaggcactacaggtcacctcatcccctctcctgcctccatggcacacgtcaccctccccaggccacttccaagtcactcagagttgtgggacagagngaagctctctgcatggcgtttccttggctatggnttgcagaggctgcaaactccaatgagctacagtttgggggcag

SEQ ID NO: 9530 - DNA, 450 bp, Homo sapiens
  unsure (11): n=A,T,C or G
  unsure (18): n=A,T,C or G
  unsure (21): n=A,T,C or G
  unsure (36): n=A,T,C or G
  unsure (86): n=A,T,C or G
  unsure (122): n=A,T,C or G
  unsure (123): n=A,T,C or G
  unsure (132): n=A,T,C or G
  unsure (139): n=A,T,C or G
  unsure (143): n=A,T,C or G
  unsure (151): n=A,T,C or G
  unsure (155): n=A,T,C or G
  unsure (156): n=A,T,C or G
  unsure (190): n=A,T,C or G
  unsure (198): n=A,T,C or G
  unsure (199): n=A,T,C or G
  unsure (219): n=A,T,C or G
  unsure (345): n=A,T,C or G
  unsure (351): n=A,T,C or G
  unsure (357): n=A,T,C or G
  unsure (397): n=A,T,C or G
  unsure (399): n=A,T,C or G
  unsure (428): n=A,T,C or G
  unsure (431): n=A,T,C or G
  unsure (432): n=A,T,C or G
  unsure (439): n=A,T,C or G
ccttgcctcanatccaangtnactcggaagaggccntgtctaccctcaatgacactcatggaggaaatgctgagagaagcattcanatgcatgacacaaggtaagactgccaaaaatcttgnncttgctctnctcattntgtnatttgttntatnnttaggagttttgagagcaaaatgacaacacccanaaattcanntaaatgggactttcccggcngagccaatgaaaggccctattgctatgcaatctggtccaaaaccactcttcaggaggatgtcttcactggtgggccccacgcaaagcttcttcatgagggaatctaagactttgggggctgtccanattatnaatggnctcttccacattgccctggggggtcttctgatgatcccancngggatctatgcacccatctgtgtgactgngtnntaccctntctggggaggc

SEQ ID NO: 9531 - DNA, 242 bp, Homo sapiens
  unsure (40): n=A,T,C or G
ccagcaatctgcctgagcagttcgactgtgccatcaacanccgcattgacgtgatggtccacttcgacctgccgcagcaggaggagcgggagcgcctggtgagactgcattttgacaactgtgttcttaagccggccacagaaggaaaacggcgcctgaagctggcccagtttgactacgggaggaagtgctcggaggtcgctcggctgacggagggcatgtcgggccgggagatcgctcag

SEQ ID NO: 9532 - DNA, 271 bp, Homo sapiens
aaagtttgctgtgtttgtaaccagtgtgtgttgagaaggaccaacaccaaaccaccctggggaagggggacagggaaacatttaacacagacgatgatcaggatttgccccaaaccaccccaagagagaggactgagtggaacaaaaaagtgacccccagaacctctcttagtgtgagggtgggtagaatgagaactgacacctgggagctgtggggagcagagcggctttggggaagagtggagtgactagacacctaatgccctggcag

SEQ ID NO: 9533 - DNA, 373 bp, Homo sapiens; identical to SEQ ID NO: 177

SEQ ID NO: 9534 - DNA, 409 bp, Homo sapiens
tcgggagggaggaaggtggcaagatggtgttggaaagcactatggtgtgtgtggacaacagtgagtatatgcggaatggagacttcttacccaccaggctgcaggcccagcaggatgctgtcaacatagtttgtcattcaaagacccgcagcaaccctgagaacaacgtgggccttatcacactggctaatgactgtgaagtgctgaccacactcaccccagacactggccgtatcctgtccaagctacatactgtccaacccaagggcaagatcaccttctgcacgggcatccgcgtggcccatctggctctgaagcaccgacaaggcaagaatcacaagatgcgcatcattgcctttgtgggaagcccagtggaggacaatgagaaggatgtgagtccaagtggcag

SEQ ID NO: 9535 - DNA, 396 bp, Homo sapiens
ctgctgggggaagcagcttgttcaatgggagaactgggctgtgaagtctgaccagactgggctcaaaccccctctctgccacattctagcaaggcgtttaggctttgagcctcagtgttgccacctgtgaaacgggtgacactatgtcacagactgcagggtgaggttgtggaaacgcccagcatggaccgggacacaggcggcgctccatgaagcttccttggctccctctctaggtggtggtcagcgtccctcagaggatcatggcccgtcacctccaccccatccagacaagcttccaggaggctacagcctccaaagtgattgttgccgtgggagacagaagctctaacctgagaggcgagtgcacccccacccagagggaagtcatccagg

SEQ ID NO: 9536 - DNA, 155 bp, Homo sapiens
aaatgttcatttaacttagttttgtttagctagttaaaacacactagcatttgtctagtttcctcatctggatgaggaaacctgctgtgatggcagtgataaaatttttccttttaggaattttgcaaataaaccactgcaattatagacacttt

SEQ ID NO: 9537 - DNA, 613 bp, Homo sapiens
ctgaggcttggaaacgtttcttgtgttgccctgaaaaatctttgagacctcagggaggctctgtctctcttaaaaggtggagaaagatgccattctctccctaaggtctggtggagtctccccatcttgcatacccttctgcaagccatctatctctgctcactctccaattgacccgcctgggaacaagggatgaggaggagttgggggctggggggaatcctgccagttggtgaagccctgtggcaggaaggtatatgtggacatagagtatacctgactctctttcttcagccactgactgcttgggttgggctgtgaatgataatggaatggctggagtctgctgttgtcagaaggcagggagggtgatgaaggactgacccacatggactgggatgtgtgtcggttatgggcatgactgcacgttcactctcagtgggatctgggcaacatggagttcattgtcctgttgcttacttactgcaatgtctttggccctccttttcaactggttcctctgttgggcccaaaggttgggagtaggagacagtatcccaggctgacaagggcttgccctttaccttgggcaccttgttaatttttagcctgt

SEQ ID NO: 9538 - DNA, 422 bp, Homo sapiens
ccaggggagggctccatggttctttagcacaggctgtggcctcacacactccagtctccatggtaacccaagcactcaggctattatgtcccacacctcctcgctggcctgcttctgtcaactctacgctggtagaagatctcggcattagctgtctggggaagctaacttcctacagtgggttttagttgagttaatcaccactggtgtaaaacgcttgtgcatcttaggaacccaaatcttccccaaattctagacaatcccacaaaatgctagtatctaggtttagatctaggtcctgtcttccgtttgaagccttcagggtaaaggagggcagagataaggctctctcctggggaaaggagttctacacaaaaatgacctcagaatgggggccattagcctcaagcatctgtgtgagg

SEQ ID NO: 9539 - DNA, 362 bp, Homo sapiens; identical to SEQ ID NO: 6999

SEQ ID NO: 9540 - DNA, 336 bp, Homo sapiens
aaaattacaattgaagtaaaataatgtgtcttatttcagtataaaggatcatttgaaactgttgattccaaacatcaactaatattatatagtcatcagtagaattataaggatgccatatcatgacattttagaagtggagagtgcatcatatgtagaaaataaatattcagacgtggctcattaatgttactaagttggaagtgagaatttatgaacattaattcattttaagaaaagtgcagccaggcgcagtggctcatgcctgtaatcctagcactttgggaggccaaagtgggcagatcacctgaggtcaggagttcaagaccagcctgg

SEQ ID NO: 9541 - DNA, 490 bp, Homo sapiens
ccagcaaacttgaggctcctttcactcaggatgacacccttggactggaaaactcacacccggtctggacacagaaagagaaccaacagctcatcaaggaagtggatgccaaaactactcatggaattctacagaaaccagtggaggctgacaccgacctcctgggggatgcaagcccagcctttgggagtggcagctccagcgagtctggcccaggtgccctggctgacctggattgctcaagctcttcccagagcccaggaagttctgagaaccaaatggtgtctccaggaaaagtgtctggcagccctgagcaagccgtggaggaaaaccttagttcctattccttagacagaagagtgacacccgcctctgagaccctagaagacccttgcaggacagagtcccagcacaaagcggagactccgcacggagccgaggaagaatgcaaagcggagactccgcacggagccgaggaggaatgccggca

SEQ ID NO: 9542 - DNA, 526 bp, Homo sapiens
aaacatcatccttgtcttgtgaagaaaacaggaagaatgtcatgtaccatgtggatcaccttcagttcaaagttgcagcaaagtgaagaaagaaactactggaagccacccagcaatgcactgtttagtcatcaattaggagcccatgggaggataatagggagactgggtggaggctcagtgtgtaataatctcttgtctaatgtatgtgtgtcactgccatgttgtatgaacaatagtgagggctcacatttacttaacacttgtgtgcgcaaatctgggttcttcttcctttccagaactatgactcgatcataaaatctgttttgtttgcatgcatgcccaaaacaaccctgtaagtagaacattgtcattatctctgttttagagatgaggaaacaggctcagagaagctcagaaatttgttcaagatcgcacagctagtaaatggcagaagtaggattgtgaacccagggaatctccagagcctctgtgtaaccatgatgttatattttttttcctcttt

SEQ ID NO: 9543 - DNA, 327 bp, Homo sapiens; identical to SEQ ID NO: 179
  unsure (321): n=A,T,C or G

SEQ ID NO: 9544 - DNA, 192 bp, Homo sapiens; identical to SEQ ID NO: 180
  unsure (31): n=A,T,C or G
  unsure (106): n=A,T,C or G
  unsure (119): n=A,T,C or G
  unsure (120): n=A,T,C or G
  unsure (136): n=A,T,C or G
  unsure (144): n=A,T,C or G
  unsure (155): n=A,T,C or G
  unsure (183): n=A,T,C or G

SEQ ID NO: 9545 - DNA, 171 bp, Homo sapiens; identical to SEQ ID NO: 181
  unsure (86): n=A,T,C or G
  unsure (120): n=A,T,C or G
  unsure (122): n=A,T,C or G
  unsure (154): n=A,T,C or G
  unsure (155): n=A,T,C or G
  unsure (160): n=A,T,C or G
  unsure (167): n=A,T,C or G

SEQ ID NO: 9546 - DNA, 318 bp, Homo sapiens
aaagaaattggagatattgctggtgttgctgatgttacaatcagacagtcctatagactgatctatcctcgagccccagatctgtttcctacagacttcaaatttgacaccccagtggacaaactaccacagctataaattgaggcagctaacgtcaaattcttgaatacaaaactttgcctgttgtacatagcctatacaaaatgctgggttgagcctttcatgaggaaaaacaaaagacatggtacgcattccagggctgaatactattgcttggcattctgtatgtatatactagtgaaacatatttaatgattt

SEQ ID NO: 9547 - DNA, 301 bp, Homo sapiens
aaagaaggggacaaagctgaaccagccacttggaagacgaggttacgctgtgctttgaataagagcccagattttgaggaagtgacggaccggtcccaactggacatttccgagccatacaaagtttaccgaattgttcctgaggaagagcaaaaatgcaaactaggcgtggcaactgctggctgcgtgaatgaagttacagagatggagtgcggtcgctctgaaatcgacgagctgatcaaggagccttctgtggacgattacatggggatgatcaaaaggagcccttccccgccggagg

SEQ ID NO: 9548 - DNA, 136 bp, Homo sapiens; identical to SEQ ID NO: 178
  unsure (100): n=A,T,C or G

SEQ ID NO: 9549 - DNA, 220 bp, Homo sapiens
cctgggatgcagggagaaaggctgaccacaagttgagacaagatacagaaacaaacaaaaacagcagaaagtccgatcgatggtgtaagtgttgtgttcactgcttagggtgcaggtgagcttgatcgaggctcccagtaaggcagatgtagacgggggctgagtcagcacaggcagagcacagagacctgtggagaaaatgaagggcagtaggtagaag

SEQ ID NO: 9550 - DNA, 373 bp, Homo sapiens; identical to SEQ ID NO: 182

SEQ ID NO: 9551 - DNA, 181 bp, Homo sapiens
ggcctgggcaggtttcatggtcctgctgatgatcccatggggctctgctgcaaaactggtctgctacttcaccaactgggcccagtacagacagggggaggctcgcttcctgcccaaggacttggaccccagcctttgcacccacctcatctacgccttcgctggcatgaccaaccaccag

SEQ ID NO: 9552 - DNA, 297 bp, Homo sapiens
ctggagcccttccctgagaaactcttacaggccaggaagccagtacagacctttgagaggtctgtgtacagtgacaggtatatctttgcaaagaatctttttgaaaatggttccctcagtgacatcgagtggcatatctatcaggactggcattcttttctcctgtgggagtttgccagccggatcacattacatggcttcatctacctccaggcttctccccaggtttgtttgaagagactgtaccagagggccagggaggaggggaaaggaattgagctggcctatctagagcag

SEQ ID NO: 9553 - DNA, 583 bp, Homo sapiens
ctgtgcattctctcctgactcttctatgctgtgttcagtcggagccagtaaagcagttttcctttggaatatggataaatacaccatgatacggaaactagaaggacatcaccatgatgtggtagcttgtgacttttctcctgatggagcattactggctactgcatcttatgatactcgagtatatatctgggatccacataatggagacattctgatggaatttgggcacctgtttcccccacctactccaatatttgctggaggagcaaatgaccggtgggtacgatctgtatcttttagccatgatggactgcatgttgcaagccttgctgatgataaaatggtgaggttctggagaattgatgaggattatccagtgcaagttgcacctttgagcaatggtctttgctgtgccttctctactgatggcagtgttttagctgctgggacacatgacggaagtgtgtatttttgggccactccacggcaggtccctagcctgcaacatttatgtcgcatgtcaatccgaagagtgatgcccacccaagaagttcaggagctgccgattccttccaagctt

SEQ ID NO: 9554 - DNA, 498 bp, Homo sapiens
  unsure (20): n=A,T,C or G
  unsure (21): n=A,T,C or G
  unsure (28): n=A,T,C or G
  unsure (82): n=A,T,C or G
  unsure (97): n=A,T,C or G
  unsure (102): n=A,T,C or G
  unsure (108): n=A,T,C or G
  unsure (127): n=A,T,C or G
  unsure (137): n=A,T,C or G
  unsure (160): n=A,T,C or G
  unsure (166): n=A,T,C or G
  unsure (172): n=A,T,C or G
  unsure (184): n=A,T,C or G
  unsure (208): n=A,T,C or G
  unsure (210): n=A,T,C or G
  unsure (220): n=A,T,C or G
  unsure (234): n=A,T,C or G
  unsure (252): n=A,T,C or G
  unsure (272): n=A,T,C or G
  unsure (275): n=A,T,C or G
  unsure (314): n=A,T,C or G
  unsure (338): n=A,T,C or G
  unsure (345): n=A,T,C or G
  unsure (353): n=A,T,C or G
  unsure (354): n=A,T,C or G
  unsure (372): n=A,T,C or G
  unsure (449): n=A,T,C or G
  unsure (486): n=A,T,C or G
ctgtgaactgcttgttagcnntcttcanggtgcctttcgagaaataatacaccttgttcacttcaataagaggaaagaactngtccacttgctcatngaaanctgtanctcggatttcaccactttngtcaaccagntctagggagaaaagcttcccttnccctcnggagtngctccaggtacngatctgacttttgttggtaacacnancacaaatggnccacttggactggnaaggagtgaggctggcantgggcaccactttggactgngtncccccagaagtgtgtgacaggctgggacctgcagctttnccaaatgtctttgaagcaccatangccttanaaacagtnnaacccattcccgagcttncattctgcggctggggcctgctgcttgctgctgggctggctgctggcgctggaggagctacttgcggctgcccgagnccttcattatagggcactggattgccaatcttcactncaactgcttcag

SEQ ID NO: 9555 - DNA, 585 bp, Homo sapiens; identical to SEQ ID NO: 183

SEQ ID NO: 9556 - DNA, 349 bp, Homo sapiens; identical to SEQ ID NO: 640

SEQ ID NO: 9557 - DNA, 127 bp, Homo sapiens
ctgtatcaaatgaaccgagttggaggaaattgtataggagtatatcttaatggcactacagcaaactgtgttaaatttgggtttttggcaaagattgaagaaaactggtattcaagatgtactgcag

SEQ ID NO: 9558 - DNA, 389 bp, Homo sapiens
aaaggaaaaaaaaagttcagtcagaagttgaatgtccccataaggagtaacagaggtcattcctgattaatctaatttaatctttataattcaaggatcctcccagccaaaacaatctcaggtatccgattttatgcaattcattttgtgagtaacatcacagaaggattgagtaggatactggtttaaccatgggcataacattttttttttcagtattgaagagtaaagctaaagtttgttcactaagatgtttaattcaagccccagtaacagagatacacaactgccaaagtcagctcttaggggtgttgtaccaggaggtggtgtaaacagatctggacccagagaattagaaagaaaaggcagaatgaagttcacaacagcag

SEQ ID NO: 9559 - DNA, 337 bp, Homo sapiens
ctggctgatgtctgcttggacactccactctgtaatgggcacaccacagggatggatgtcctctgggcagggacccccatggtgaccatgccaggagagactcttgcttctcgagttgcagcatcccagctcacttgcttaggttgtcttgagcttattgctaaaaacagacaagaatatgaagacatagctgtgaagctgggaactgatctagaatacctgaagaaagttcgtggcaaagtctggaagcaaagaatatctagccctctgttcaacaccaaacaatacacaatggaactagagcggctctatctacagatgtgggagcattatgcag

SEQ ID NO: 9560 - DNA, 584 bp, Homo sapiens
  unsure (569): n=A,T,C or G
aaaagttataataataaatacccacacatgtaattatacattctaggctgggagtgggggctcacacctggaatcccagcactttgggaggccgaggccggtggatcacctgaggtcattgggagttcgagaccagcctgaccaacatggagaatccctgtctctactaaaaatacaaagttagccaggcatggtggcacatacctgtaatcccagctacttgggaggctgaggcaggagaatcacttgaacccgggaggtggaggtagtggtgagccgagattgtgccattgcactccagcctgggcaacaaaagcgaaactccgtctcaaaaaaaagttacacattcgttcctattatccttgccgtaaataaatgtgacaaagctgaggctgatcctgagaaagtgaaaaaagagctgctggcttacgatgtggtatgtgaagattatggaggtgatgttcaagcagtgcctgtctccgcacttacgggcgataatctgatggctttggcagaagcaacagttgctcttgcagaaatgttagaattgaaagcagatcccaatggtncagtggaaggaacag

SEQ ID NO: 9561 - DNA, 255 bp, Homo sapiens
cctggatcccggcctttccctgtgacttacgtgtctgtcaccggcaggcagccctacaaatcctggtgacctgctctcccaagaacagagcctgtccccagatgtcccagtagcgatgagtaacagaggtggctgtggacttcctctacttctccttgctggatcagggccttcctgcctcccgctgggcaggtctggccttgctctcttggcagggccccagcccctctgaccactctgcagctcaccatgcag

SEQ ID NO: 9562 - DNA, 357 bp, Homo sapiens
aaatacacagacgggcgagtggcgcccgtgtcgatgtcttcagccagtggtgaccctgcttttgtaaccgcgtcaacctgacaaaacctcagcagcagaagtccctatttttctaggagttcatcgtgcagacagtcttcactacaggactcggccctggggcctctgcctctcgtctgaccttgcagccttagtcgttggaggctggagcgcaatggccctgccgtctgtggagcctctgggcggccttctttcctttctgtcaacctctcatttcacagaaaaaggctgaatttcattttttccagcatgaaagccaggatcggttagtggttggattctattggtttttttttt

SEQ ID NO: 9563 - DNA, 155 bp, Homo sapiens; identical to SEQ ID NO: 184
  unsure (46): n=A,T,C or G
  unsure (52): n=A,T,C or G
  unsure (67): n=A,T,C or G
  unsure (108): n=A,T,C or G
  unsure (114): n=A,T,C or G
  unsure (117): n=A,T,C or G
  unsure (128): n=A,T,C or G
  unsure (130): n=A,T,C or G

SEQ ID NO: 9564 - DNA, 248 bp, Homo sapiens
aaaaatgttagagctgttttacaattattttcacttccctagctttctgagcctgtaagtctctcttccctatttcaacattcatcctaaagagttttcaattagtatgtgaaaccaaaaggtcagagtgttttagtctgatacaaatcatccctaactaaaatgattccagtatgtgcttccatttcattaaaactgttctgtgaaaatttggatatcctcaggaatgcattattacagaataattt

SEQ ID NO: 9565 - DNA, 257 bp, Homo sapiens
gtgaaatcatacaggaagtgggaaaactctatccactggagatagtatttggaatgaatggaagaatatgggttaaggcaaaaaccatccagcagactttaattttggcaaacattttagaagcttgtgaacacatgacgtcagatcaaagaaaacagatcttctccagattggcagaaagttgatataggtggacttttttacaggtcagttgaggcaaaaaactatgggttttttcaggtgaacctcccccattt

SEQ ID NO: 9566 - DNA, 119 bp, Homo sapiens; identical to SEQ ID NO: 185
  unsure (10): n=A,T,C or G
  unsure (60): n=A,T,C or G
  unsure (78): n=A,T,C or G

SEQ ID NO: 9567 - DNA, 579 bp, Homo sapiens; identical to SEQ ID NO: 340

SEQ ID NO: 9568 - DNA, 460 bp, Homo sapiens
ctgtgccaggctgtcaagttcctccatgataacaagctgacacatacagacctcaagcctgaaaatattctgtttgtgaattcagactatgagctcacctacaacctagagaagaagcgagatgagcgcagtgtgaagagcacagctgtgcgggtggtagactttggcagtgccacctttgaccatgagcaccatagcaccattgtctccactcgccattaccgagcaccagaagtcatccttgagttgggctggtcacagccttgtgatgtgtggagtataggctgcatcatctttgaatactatgtgggattcaccctcttccagacccatgacaacagagagcatctagccatgatggaaaggatcttgggtcctatcccttcccggatgatccgaaagacaagaaagcagaaatatttttaccggggtcgcctggattgggatgagaacacatcag

SEQ ID NO: 9569 - DNA, 449 bp, Homo sapiens
aaaccgtagttggcgcagaggtcagtcctagtcggagcttaggaggggcggagacgctcacatcgtctgacttgagtcgccactgattgtggcaacagctttgcctcatgagtcaaaaattggcaatttcttttgatttttagttgttgaatttgctgtttcaagcatttgtacatattagaagtctaaggagtagcaagtcagtgggaggactttttcacccctggcattagcagcttcgacctcattttccagatgcaccagctcctattaataagttagcaaggaaagtgtatgtcacgtgcaggaacagtgaggcagggacaggggttctgctccttctcacttcaccaccggcacacggcttgcccctgtctttgcccccaaaggtattttgtgtctagtgtcacattggagctattcttcactggtccttaaccttgggtttt

SEQ ID NO: 9570 - DNA, 101 bp, Homo sapiens; identical to SEQ ID NO: 186
  unsure (14): n=A,T,C or G
  unsure (23): n=A,T,C or G
  unsure (36): n=A,T,C or G
  unsure (48): n=A,T,C or G
  unsure (72): n=A,T,C or G
  unsure (84): n=A,T,C or G
  unsure (89): n=A,T,C or G
  unsure (90): n=A,T,C or G

SEQ ID NO: 9571 - DNA, 84 bp, Homo sapiens; identical to SEQ ID NO: 188
  unsure (32): n=A,T,C or G
  unsure (53): n=A,T,C or G
  unsure (58): n=A,T,C or G
  unsure (74): n=A,T,C or G

SEQ ID NO: 9572 - DNA, 307 bp, Homo sapiens
ctggggagagctaaaggactttgatgtgtaactgtgctgttgatgaagtcctcccagggaagcctgtgcagatgcagtcacctggaaagaacagagattaccctttcacctacctcagcaaaacaaactttcaagtcttgatagacttagcctagtaattttatagtgagagtttcaaactatatatcagtgtctatagcatcaaaaacttctgggggcgtgggggaagtagaataccaagtataatagttacattcactttcaaagagcatctatgaatttgccttttgtaacttactgtggcttt

SEQ ID NO: 9573 - DNA, 139 bp, Homo sapiens; identical to SEQ ID NO: 189
  unsure (24): n=A,T,C or G
  unsure (27): n=A,T,C or G
  unsure (113): n=A,T,C or G

SEQ ID NO: 9574 - DNA, 283 bp, Homo sapiens; identical to SEQ ID NO: 190
  unsure (211): n=A,T,C or G
  unsure (268): n=A,T,C or G
  unsure (280): n=A,T,C or G

SEQ ID NO: 9575 - DNA, 178 bp, Homo sapiens
aaaacagaaaaaatgcaaaactagggaagagaaccctagatattcactagggaaggtaccaaaatttccagaatcaaaaattccatcttctactggatgagtaaggtccaaattaaacctccaggttgacctcttgggcttcctgtctttctgcggcgccatcttgcgagtcggccgc

SEQ ID NO: 9576 - DNA, 261 bp, Homo sapiens
ccagcccgaagtcgacccctcagtcttgcttggatcatgccagccttcacccatctttgtgccctgaggtcttgggtgccaagggcagggcatcacagtcctctggctagctcccttctgagttggagctccctcaggagccccgcccaccctaagtgctggtctccacaatgcacttgaggaacattgtgtcgtccttcacgtaggcgtgcttgggtgactgcagtttgctgagggggaagaagagtgggcatccactgg

SEQ ID NO: 9577 - DNA, 224 bp, Homo sapiens
ccacctgaggacagcaccgctcacttcctcttgagggaacccttgctcttctccttgtctgctgaccgctgcttcttcactttctcctccctcttgttcttagtgtgcaggttctcatacacatcctccttgtgtctgcagccgggtgcaggggggcaagtacaggcagttggtgcaggtcaggagacagcacagggggacccggcactggcagtcccctctgg

SEQ ID NO: 9578 - DNA, 239 bp, Homo sapiens; identical to SEQ ID NO: 187

SEQ ID NO: 9579 - DNA, 307 bp, Homo sapiens
cctagggaaatccaccctcatcaacagcctcttcctcaccaacctctatgaggatcgccaggtgccagaggccagtggtaagaccctccccaccctcttgaggcagtagcccctgtccccaggttacaccctagtcttttccatctggggactcaggtagttgactgctttttttctgagactttcctcccctgggaaatgggtgcaggcaactgtgatattgacaaaggaaattaattctgcctcagagcctccccggatccctgacctctcccccatcccacagctcgcttgacacagaccctgg

SEQ ID NO: 9580 - DNA, 179 bp, Homo sapiens; identical to SEQ ID NO: 191
  unsure (13): n=A,T,C or G
  unsure (41): n=A,T,C or G
  unsure (42): n=A,T,C or G
  unsure (45): n=A,T,C or G
  unsure (65): n=A,T,C or G
  unsure (70): n=A,T,C or G
  unsure (113): n=A,T,C or G
  unsure (127): n=A,T,C or G
  unsure (153): n=A,T,C or G
  unsure (168): n=A,T,C or G

SEQ ID NO: 9581 - DNA, 280 bp, Homo sapiens
ccagtgtggcggctcatgcctgtaatcccaacactttgggagaccaacatgagaggaacacgtgaggccaggagttcaagaccagctcagcaacacagcaagaccctgtctctacaaaaaaataaaattagccaggcatagtggcatacacttgtagtcccagctactcaggaggctgagataggagaattgcttgagcccagaaggtcaaggctgcaggtgagccatgatctcgccattgtactccagcctgggtaacagaatgaaagcctgtctcttt

SEQ ID NO: 9582 - DNA, 54 bp, Homo sapiens; identical to SEQ ID NO: 195
  unsure (21): n=A,T,C or G
  unsure (44): n=A,T,C or G

SEQ ID NO: 9583 - DNA, 375 bp, Homo sapiens; identical to SEQ ID NO: 50

SEQ ID NO: 9584 - DNA, 130 bp, Homo sapiens; identical to SEQ ID NO: 197
  unsure (41): n=A,T,C or G
  unsure (42): n=A,T,C or G
  unsure (73): n=A,T,C or G
  unsure (92): n=A,T,C or G
  unsure (99): n=A,T,C or G
  unsure (111): n=A,T,C or G
  unsure (122): n=A,T,C or G
  unsure (123): n=A,T,C or G
  unsure (125): n=A,T,C or G

SEQ ID NO: 9585 - DNA, 464 bp, Homo sapiens
aaaagaaattggtaacatcactttctcagactcctctcctacatttctttaaccactgctcagcctcctttaccaagtcctttgactcttgtaaaatgttgatattcccagggttttctcaatggctttctttttattctacatcttctgcctcatggataagctcattgagatctatggctttgcctaataattataataaaagtattctaagcctgcattttcaaccagagttctatctccagctagaaatgcatataatccaattgcctactgaatgtatcccccatgaatgtttcattgaactcaacatgtgaagaaaactattggtctgtcccatgactgtttgcacttctctgttaacctgacaaattcctactccttccccatgagcattgtaaatccttgtgcacaatctgaaaacttatgagtgacctgagattttatctatcccctagcttttt

SEQ ID NO: 9586 - DNA, 90 bp, Homo sapiens; identical to SEQ ID NO: 192
  unsure (78): n=A,T,C or G

SEQ ID NO: 9587 - DNA, 585 bp, Homo sapiens; identical to SEQ ID NO: 183

SEQ ID NO: 9588 - DNA, 283 bp, Homo sapiens; identical to SEQ ID NO: 194

SEQ ID NO: 9589 - DNA, 191 bp, Homo sapiens; identical to SEQ ID NO: 198
  unsure (93): n=A,T,C or G
  unsure (96): n=A,T,C or G
  unsure (101): n=A,T,C or G
  unsure (182): n=A,T,C or G

SEQ ID NO: 9590 - DNA, 238 bp, Homo sapiens
ctgacaaagtagtattttagaaaagttctaaagttataaaaatgttttctgcagtaaaaaaaaagttctttgggccgggcggggtggctcacacctgtaatcccagcaccttgggaggctgaggtgggaggatcatttgaggccaggagtttgagacctgcctgggcaacataatgaaacttcctttccagggagaaaaaaaaaaaaaaaaaagctctgagagcatcttattttgttt

SEQ ID NO: 9591 - DNA, 424 bp, Homo sapiens
  unsure (230): n=A,T,C or G
  unsure (257): n=A,T,C or G
  unsure (281): n=A,T,C or G
  unsure (287): n=A,T,C or G
aaaaactccctatttatttttgttttttttttttcttcttttcctacgcaccattagccctaaaacgttgagagtaaacacttaccgaaagccgaccctggaccatgtgtctttagccatctcttggtgatgttgccaggaggatgggtcagtccaggagtggcagggcctaggtggcacctggaggtgaacacctaaccgcatgagtccttttccactgtcaggctacncggaaatactgttggtaggggggcgtntctgctgttggcagtgagaggtanaaactnggggttcttccttgctctcccctgacagacaaaaaagttcctcccccatggcttccaagctgtttccccctgtaagggaagctcgagagagagtctgctgttcagccatctgactgcttctaaatctgcttttcagg

SEQ ID NO: 9592 - DNA, 206 bp, Homo sapiens
  unsure (10): n=A,T,C or G
  unsure (29): n=A,T,C or G
  unsure (36): n=A,T,C or G
atttcatganacaagctggggaagtaacntttgcanatgcacaccgacctaaattaaatgaaggggtggttgagtttgcctcttatggtgacttaaagaatgctattgaaaaactttctggaaaggaaataaatgggagaaaaataaaattaattgaaggcagcaaaaggcacagtaggtcaagaagcaggtctcgatcccggacc

SEQ ID NO: 9593 - DNA, 290 bp, Homo sapiens
cctgtcacatgtggacctgtcacgtgtggactgtcacgtgtggacctgtcatgcatgcaccagtcacgtgtggacctgtcacgtgtgaacctgttgtgtggtcctgtcgtctgtgggcctgtcacgtgtggacgtgtcacgtgtggacccggctgaaggcaggatgcctcagccaatcctatgcctgggcagggcgggggatgcctctgcattttctgagccccatggccctgcagtgctgctgggtggctgtcacagacccaggccagcccctcctcccaggcaggcag

SEQ ID NO: 9594 - DNA, 282 bp, Homo sapiens; identical to SEQ ID NO: 199

SEQ ID NO: 9595 - DNA, 491 bp, Homo sapiens
aaagagaaacttaaatcctgttgtattctttcaacacaagcaatgatacttctcagagtctgctcaaaagctcagctctgtggactccgtgacaaaatgtacgcgtccactgccgaccctcttggtttctgaaaccaacctttcttcctgctctcctctttaagagcaaaccccaacatgtataaggtcacagcaagtggtagccagaaaaagctgtgggacccctcatttgagtcacatccatatggcatggagaaagaaaacctctctgccagaaggaactgaactctggaagtcctaaggaaggtcaccatgctcagcagataggaaagcattgccaagggctgtccctcaagagcttagttttcttagggagaccagaaagacatcagatcctgactgccctgttttgctcaagttctgaaatgagtggcatgatgaagagctggtggagctgagggaaagagtcaaccatgtggggtggggtagtg

SEQ ID NO: 9596 - DNA, 556 bp, Homo sapiens
  unsure (155): n=A,T,C or G
aaatcaactaaagactcatgagatttatttggttacagtgaataacctggacaaaatgttgagaagagttgttaaaacaagtttacattaaatatactaacaattacgtttggttacatatttgtaagtgatggttatttagaaaaactgcatanaaatccaaaccttaaatattctgcaaatcaaatcattagcttttctcttctctaataaagtagggtgactagttcttggattaatctaactataacattaatgtagcacttgattatcttatggaataattctctatctcatctaagcctcacaacaaccttgtaaagtattatccccattttatggaggaagaaacaggcttagaagtggaaaggtagattctctgctcgcacaaccgtattatgtggctaagctattgaacttgaacctagatttgggacttcatttcaaatatgaaattttttgattaaatctttttatcttgtatggaaaaaatatctcattagctgtcagatgttatttaccctgctaactgttaaaaatatttcattaaaaaaat

SEQ ID NO: 9597 - DNA, 261 bp, Homo sapiens
  unsure (35): n=A,T,C or G
  unsure (43): n=A,T,C or G
  unsure (57): n=A,T,C or G
  unsure (78): n=A,T,C or G
  unsure (84): n=A,T,C or G
  unsure (90): n=A,T,C or G
  unsure (102): n=A,T,C or G
  unsure (158): n=A,T,C or G
  unsure (229): n=A,T,C or G
  unsure (237): n=A,T,C or G
  unsure (241): n=A,T,C or G
  unsure (249): n=A,T,C or G
  unsure (252): n=A,T,C or G
aagctttttttttttttttttttttttttttttgngaaaatanctttatttcattgnggggagcgggccgatgtccancctcanaacttntggaactgcttnttggtgccggcagccttggtgaccttgagcacgttgaagcgcactgtcttgctcanaggccggcactcgcccactgtgacgatgtcaccgatctggacgtccctgaagcagggggacaggtgtacanacatgttnttgnggcgcttntcnaagcggttg
